(19) United States
(12) Patent Application Publication
(10) Pub. No.: US 2025/0376682 A1
(43) Pub. Date: Dec. 11, 2025

(54) COMPOSITIONS AND METHODS FOR INHIBITING EXPRESSION OF TRANSTHYRETIN

(71) Applicant: Alnylam Pharmaceuticals, Inc., Cambridge, MA (US)

(72) Inventors: Dinah Wen-yee Sah, Boston, MA (US); Gregory Hinkle, Plymouth, MA (US); Rene Alvarez, Boxborough, MA (US); Stuart Milstein, Arlington, MA (US); Qingmin Chen, Lincoln, MA (US)

(21) Appl. No.: 19/013,039

(22) Filed: Jan. 8, 2025

Related U.S. Application Data
(63) Continuation of application No. 17/721,704, filed on Apr. 15, 2022, now Pat. No. 12,227,744.
Application No. 17/721,704 is a continuation of application No. 17/475,142, filed on Sep. 14, 2021, now abandoned.
Application No. 17/475,142 is a continuation of application No. 17/360,849, filed on Jun. 28, 2021, now abandoned.
Application No. 17/360,849 is a continuation of application No. 17/234,657, filed on Apr. 19, 2021, now abandoned.
Application No. 17/234,657 is a continuation of application No. 17/102,351, filed on Nov. 23, 2020, now abandoned.
Application No. 17/102,351 is a continuation of application No. 16/751,026, filed on Jan. 23, 2020, now abandoned.
Application No. 16/751,026 is a continuation of application No. 16/276,541, filed on Feb. 14, 2019, now abandoned.
Application No. 16/276,541 is a continuation of application No. 15/380,571, filed on Dec. 15, 2016, now Pat. No. 10,240,152.
Application No. 15/380,571 is a continuation of application No. 14/965,825, filed on Dec. 10, 2015, now abandoned.
Application No. 14/965,825 is a continuation of application No. 14/220,829, filed on Mar. 20, 2014, now Pat. No. 9,234,196.
Application No. 14/220,829 is a continuation of application No. 13/410,262, filed on Mar. 1, 2012, now Pat. No. 8,741,866.
Application No. 13/410,262 is a continuation of application No. 12/582,669, filed on Oct. 20, 2009, now Pat. No. 8,168,775.
(60) Provisional application No. 61/106,956, filed on Oct. 20, 2008.
(60) Provisional application No. 61/115,738, filed on Nov. 18, 2008.
(60) Provisional application No. 61/156,670, filed on Mar. 2, 2009.
(60) Provisional application No. 61/185,545, filed on Jun. 9, 2009.
(60) Provisional application No. 61/242,783, filed on Sep. 15, 2009.
(60) Provisional application No. 61/244,794, filed on Sep. 22, 2009.

(51) Int. Cl. C12N 15/113; A61K 9/00; A61K 31/713; C07F 9/6533; C07H 21/04; C12N 15/11

(52) U.S. Cl. CPC C12N 15/113; A61K 9/0019; A61K 31/713; C07F 9/6533; C07H 21/04; C12N 15/111; C12N 2310/14; C12N 2310/315; C12N 2310/321; C12N 2310/335; C12N 2310/3515; C12N 2320/30; C12N 2320/32

(57) ABSTRACT

The invention relates to a double-stranded ribonucleic acid (dsRNA) targeting a transthyretin (TTR) gene, and methods of using the dsRNA to inhibit expression of TTR.

### CROSS REFERENCE TO RELATED APPLICATIONS

[0001] This application is a continuation of U.S. patent application Ser. No. 17/721,704, filed on Apr. 15, 2022, which is a continuation of U.S. patent application Ser. No. 17/475,142, filed on Sep. 14, 2021 (abandoned), which is a continuation of U.S. patent application Ser. No. 17/360,849, filed on Jun. 28, 2021 (abandoned), which is a continuation of U.S. patent application Ser. No. 17/234,657, filed on Apr. 19, 2021 (abandoned), which is a continuation of U.S. patent application Ser. No. 17/102,351, filed on Nov. 23, 2020 (abandoned), which is a continuation of U.S. patent application Ser. No. 16/751,026, filed Jan. 23, 2020 (abandoned), which is a continuation of U.S. patent application Ser. No. 16/276,541, filed on Feb. 14, 2019 (abandoned), which is a continuation of U.S. patent application Ser. No. 15/380,571, filed on Dec. 15, 2016, now U.S. Pat. No. 10,240,152, issued on Mar. 26, 2019, which is a continuation of U.S. patent application Ser. No. 14/965,825, filed on Dec. 10, 2015 (abandoned), which is a continuation of U.S. patent application Ser. No. 14/220,829, filed on Mar. 20, 2014, now U.S. Pat. No. 9,234,196, issued on Jan. 12, 2016, which is a continuation of U.S. patent application Ser. No. 13/410,262, filed Mar. 1, 2012, now U.S. Pat. No. 8,741,866, issued Jun. 3, 2014, which is a continuation of U.S. patent application Ser. No. 12/582,669, filed on Oct. 20, 2009, now U.S. Pat. No. 8,168,775, issued on May 1, 2012, which claims the benefit of U.S. Provisional Application No. 61/106,956, filed on Oct. 20, 2008; U.S. Provisional Application No. 61/115,738, filed on Nov. 18, 2008; U.S. Provisional Application No. 61/156,670, filed on Mar. 2, 2009; U.S. Provisional Application No. 61/185,545, filed on Jun. 9, 2009; U.S. Provisional Application No. 61/242,783, filed on Sep. 15, 2009; and U.S. Provisional Application No. 61/244,794, filed on Sep. 22, 2009. The entire contents of all of the foregoing are incorporated herein by reference for all purposes.

### FIELD OF THE INVENTION

[0002] The invention relates to a double-stranded ribonucleic acid (dsRNA) targeting a transthyretin (TTR) gene, and methods of using the dsRNA to inhibit expression of TTR.

### REFERENCE TO SEQUENCE LISTING

[0003] The application contains a Sequence Listing which has been submitted electronically in XML format and is hereby incorporated by reference in its entirety. Said XML copy, created on Feb. 7, 2025, is named “121301_99001_SL.xml” and is 3,543,802 bytes in size. The sequence listing contained in this XML file is part of the specification and is hereby incorporated by reference herein in its entirety.

### BACKGROUND OF THE INVENTION

[0004] Transthyretin (TTR) is a secreted thyroid hormone-binding protein. TTR binds and transports retinol binding protein (RBP)/Vitamin A, and serum thyroxine (T4) in plasma and cerebrospinal fluid.

[0005] Both normal-sequence TTR and variant-sequence TTR cause amyloidosis. Normal-sequence TTR causes cardiac amyloidosis in people who are elderly and is termed senile systemic amyloidosis (SSA) (also called senile cardiac amyloidosis (SCA)). SSA often is accompanied by microscopic deposits in many other organs. TTR mutations accelerate the process of TTR amyloid formation and are the most important risk factor for the development of clinically significant TTR amyloidosis (also called ATTR (amyloidosis-transthyretin type)). More than 85 amyloidogenic TTR variants are known to cause systemic familial amyloidosis. The liver is the major site of TTR expression. Other significant sites of expression include the choroid plexus, retina and pancreas.

[0006] TTR amyloidosis manifests in various forms. When the peripheral nervous system is affected more prominently, the disease is termed familial amyloidotic polyneuropathy (FAP). When the heart is primarily involved but the nervous system is not, the disease is called familial amyloidotic cardiomyopathy (FAC). A third major type of TTR amyloidosis is called leptomeningeal/CNS (Central Nervous System) amyloidosis.

[0007] Double-stranded RNA molecules (dsRNA) have been shown to block gene expression in a highly conserved regulatory mechanism known as RNA interference (RNAi). WO 99/32619 (Fire et al.) disclosed the use of a dsRNA of at least 25 nucleotides in length to inhibit the expression of genes in C. elegans. dsRNA has also been shown to degrade target RNA in other organisms, including plants (see, e.g., WO 99/53050, Waterhouse et al.; and WO 99/61631, Heifetz et al.), Drosophila (see, e.g., Yang, D., et al., Curr. Biol. (2000) 10:1191-1200), and mammals (see WO 00/44895, Limmer; and DE 101 00 586.5, Kreutzer et al.).

[0008] US20070207974 discloses functional and hyperfunctional siRNAs. US20090082300 discloses antisense molecules directed against TTR. U.S. Pat. No. 7,250,496 discloses microRNAs directed against TTR.

### SUMMARY OF THE INVENTION

[0009] In one embodiment, the invention provides a double-stranded ribonucleic acid (dsRNA) for inhibiting expression of transthyretin (TTR), wherein said dsRNA comprises a sense strand and an antisense strand, the antisense strand comprising a region complementary to a part of a mRNA encoding transthyretin (TTR), wherein said region of complementarity is less than 30 nucleotides in length and the antisense strand comprises 15 or more contiguous nucleotides of SEQ ID NO:170, SEQ ID NO:450, SEQ ID NO:730, or SEQ ID NO:1010. In a related embodiment, the sense strand comprises 15 or more contiguous nucleotides of SEQ ID NO:169, SEQ ID NO:449, SEQ ID NO:729, or SEQ ID NO:1009. In yet another related embodiment, the sense strand consists of SEQ ID NO:449 and the antisense strand consists of SEQ ID NO:450. In yet another related embodiment, the sense strand consists of SEQ ID NO:729 and the antisense strand consists of SEQ ID NO:730. In still another related embodiment, the sense strand consists of SEQ ID NO:1009 and the antisense strand consists of SEQ ID NO:1010. In yet another related embodiment, the dsRNA comprises a sense strand selected from Tables 3A, 3B, 4, 6A, 6B, 7, and 16, and an antisense strand selected from Tables 3A, 3B, 4, 6A, 6B, 7, and 16.

[0010] In certain embodiments, the region of complementarity between the antisense strand of the dsRNA and the mRNA encoding transthyretin is 19 nucleotides in length. In another embodiment, the region of complementary consists of SEQ ID NO:169. In other embodiments, each strand of the dsRNA is 19, 20, 21, 22, 23, or 24 nucleotides in length. In still another embodiment, each strand is 21 nucleotides in length.

[0011] In certain embodiments, the dsRNA for inhibiting expression of transthyretin does not cleave a TTR mRNA between the adenine nucleotide at position 637 of SEQ ID NO:1331 and the guanine nucleotide at position 638 of SEQ ID NO:1331. In other embodiments, the dsRNA cleaves a TTR mRNA between the guanine nucleotide at position 636 of SEQ ID NO:1331 and the adenine nucleotide at position 637 of SEQ ID NO:1331. In certain embodiments, the dsRNA anneals to a TTR mRNA between the guanine nucleotide at position 628 of SEQ ID NO:1331 and the uracil nucleotide at position 646 of SEQ ID NO: 1331.

[0012] In still other related embodiments, the invention provides dsRNA as described above for inhibiting expression of transthyretin wherein the dsRNA comprises one or more modified nucleotides. In related embodiments, at least one modified nucleotide (or nucleotides) is chosen from the group consisting of: a 2′-O-methyl modified nucleotide, a nucleotide comprising a 5′-phosphorothioate group, and a terminal nucleotide linked to a cholesteryl derivative or dodecanoic acid bisdecylamide group. In another related embodiment, the modified nucleotide is chosen from the group of: a 2′-deoxy-2′-fluoro modified nucleotide, a 2′-deoxy-modified nucleotide, a locked nucleotide, an abasic nucleotide, 2′-amino-modified nucleotide, 2′-alkyl-modified nucleotide, morpholino nucleotide, a phosphoramidate, and a non-natural base comprising nucleotide. In certain embodiments, the dsRNA comprises at least one 2′-O-methyl modified nucleotide.

[0013] In other embodiments, a dsRNA as described above for inhibiting expression of transthyretin is conjugated to a ligand, or formulated in a lipid formulation. In certain embodiments, the lipid formulation may be a LNP formulation, a LNP01 formulation, a XTC-SNALP formulation, or a SNALP formulation. In related embodiments, the XTC-SNALP formulation is as follows: using 2,2-Dilinoleyl-4-dimethylaminoethyl-[1,3]-dioxolane (XTC) with XTC/DPPC/Cholesterol/PEG-cDMA in a ratio of 57.1/7.1/34.4/1.4 and a lipid:siRNA ratio of about 7. In still other related embodiments, the sense strand of the dsRNA consists of SEQ ID NO: 1009 and the antisense strand consists of SEQ ID NO:1010, and the dsRNA is formulated in a XTC-SNALP formulation as follows: using 2,2-Dilinoleyl-4-dimethylaminoethyl-[1,3]-dioxolane (XTC) with a XTC/DPPC/Cholesterol/PEG-cDMA in a ratio of 57.1/7.1/34.4/1.4 and a lipid:siRNA ratio of about 7. Alternatively, a dsRNA such as those described above can be formulated in a LNP09 formulation as follows: using XTC/DSPC/Chol/PEG2000-C14 in a ratio of 50/10/38.5/1.5 mol % and a lipid:siRNA ratio of about 11:1. In another variation, the dsRNA is formulated in a LNP11 formulation as follows: using MC3/DSPC/Chol/PEG2000-C14 in a ratio of 50/10/38.5/1.5 mol % and a lipid:siRNA ratio of about 11:1. In still another embodiment, the dsRNA is formulated in a LNP09 formulation or a LNP11 formulation and reduces TTR mRNA levels by about 85 to 90% at a dose of 0.3 mg/kg, relative to a PBS control group. In yet another embodiment, the dsRNA is formulated in a LNP09 formulation or a LNP11 formulation and reduces TTR mRNA levels by about 50% at a dose of 0.1 mg/kg, relative to a PBS control group. In yet another embodiment, the dsRNA is formulated in a LNP09 formulation or a LNP11 formulation and reduces TTR protein levels in a dose-dependent manner relative to a PBS control group as measured by a western blot. In yet another embodiment, the dsRNA is formulated in a SNALP formulation as follows: using DlinDMA with a DLinDMA/DPPC/Cholesterol/PEG2000-cDMA in a ratio of 57.1/7.1/34.4/1.4 and a lipid:siRNA ratio of about 7.

[0014] In certain embodiments, the invention provides a dsRNA such as those described above for inhibiting expression of transthyretin, wherein administration of the dsRNA to a cell results in about 95% inhibition of TTR mRNA expression as measured by a real time PCR assay, wherein the cell is a HepG2 cell or a Hep3B cell, and wherein the concentration of the dsRNA is 10 nM. In related embodiments, administration of the dsRNA to a cell results in about 74% inhibition of TTR mRNA expression as measured by a branched DNA assay, wherein the cell is a HepG2 cell or a Hep3B cell, and wherein the concentration of the dsRNA is 10 nM. In other related embodiments, the dsRNA has an IC50 of less than 10 pM in a HepG2 cell, wherein the concentration of the dsRNA is 10 nM. In still other related embodiments, the dsRNA has an ED50 of about 1 mg/kg. In still other related embodiments, administration of the dsRNA reduces TTR mRNA by about 80% in cynomolgus monkey liver, wherein the concentration of the dsRNA is 3 mg/kg. In still other related embodiments, administration of the dsRNA does not result in immunostimulatory activity in human peripheral blood mononuclear cells (PBMCs) as measured by IFN-alpha and TNF-alpha ELISA assays. In still other related embodiments, administration of the dsRNA reduces liver TTR mRNA levels by about 97% or serum TTR protein levels by about 90%, wherein the concentration of the dsRNA is 6 mg/kg. In still other related embodiments, administration of the dsRNA reduces liver TTR mRNA levels and/or serum TTR protein levels up to 22 days, wherein the concentration of the dsRNA is 6 mg/kg or 3 mg/kg. In still other related embodiments, the dsRNA suppresses serum TTR protein levels up to day 14 post-treatment when administered to a subject in need thereof at 1 mg/kg or 3 mg/kg. In still other related embodiments, the dsRNA reduces TTR expression by 98.9% in a Hep3B cell at a concentration of 0.1 nM as measured by real-time PCR. In still other related embodiments, the dsRNA reduces TTR expression by 99.4% in a Hep3B cell at a concentration of 10 nM as measured by real-time PCR.

[0015] In other embodiments, the invention provides a double-stranded ribonucleic acid (dsRNA) for inhibiting expression of transthyretin (TTR), wherein said dsRNA comprises a sense strand and an antisense strand, the antisense strand comprising a region complementary to a part of a mRNA encoding transthyretin (TTR), wherein said region of complementarity is less than 30 nucleotides in length and wherein the dsRNA comprises a sense strand selected from Tables 3A, 3B, 4, 6A, 6B, 7, and 16, and an antisense strand selected from Tables 3A, 3B, 4, 6A, 6B, 7, and 16.

[0016] In another embodiment, the invention provides a double-stranded ribonucleic acid (dsRNA) for inhibiting expression of transthyretin (TTR), wherein said dsRNA comprises an antisense strand comprising a region complementary to 15-30 nucleotides of nucleotides 618-648 of SEQ ID NO: 1331 and wherein said antisense strand base pairs with the guanine at position 628 of SEQ ID NO:1331.

[0017] In certain embodiments, the invention provides a cell containing any of the dsRNAs described in the Summary, above. In certain other embodiments, the invention provides a vector comprising a nucleotide sequence that encodes at least one strand of any of the dsRNAs described in the Summary, above. In certain embodiments, the vector is in a cell.

[0018] In other embodiments, the invention provides a pharmaceutical composition for inhibiting expression of a TTR gene comprising any of the dsRNAs described in the Summary, above, and a pharmaceutically acceptable carrier. In related embodiments, the invention provides a pharmaceutical composition for inhibiting expression of a TTR gene comprising a dsRNA and a SNALP formulation, wherein the dsRNA comprises an antisense strand which is less than 30 nucleotides in length and comprises 15 or more contiguous nucleotides of SEQ ID NO: 170, SEQ ID NO:450, SEQ ID NO: 730, or SEQ ID NO: 1010, and wherein the SNALP formulation comprises DlinDMA, DPPC, Cholesterol and PEG2000-cDMA in a ratio of 57.1/7.1/34.4/1.4 respectively.

[0019] In yet another embodiment, the invention provides a method of inhibiting TTR expression in a cell, the method comprising: (a) contacting the cell with any of dsRNAs described in the Summary, above; and (b) maintaining the cell produced in step (a) for a time sufficient to obtain degradation of the mRNA transcript of a TTR gene, thereby inhibiting expression of the TTR gene in the cell.

[0020] In yet another embodiment, the invention provides a method of treating a disorder mediated by TTR expression comprising administering to a human in need of such treatment a therapeutically effective amount of any of the dsRNAs describe in the Summary, above. In related embodiments, the dsRNA is administered to the human at about 0.01, 0.1, 0.5, 1.0, 2.5, or 5.0 mg/kg. In yet another related embodiment, the dsRNA is administered to the human at about 1.0 mg/kg. In yet another related embodiment, the human being treated has transthyretin amyloidosis, and/or a liver disorder. In a related embodiment, the human is further provided a liver transplant. In yet another embodiment, administration of the dsRNA reduces TTR mRNA by about 80% in human liver, wherein the concentration of the dsRNA is 3 mg/kg. In yet another related embodiment, administration of the dsRNA does not result in immunostimulatory activity in the human as measured by IFN-alpha and TNF-alpha ELISA assays. In yet another related embodiment, administration of the dsRNA reduces liver TTR mRNA levels by about 97% or serum TTR protein levels by about 90%, wherein the concentration of the dsRNA is 6 mg/kg. In yet another related embodiment, administration of the dsRNA reduces liver TTR mRNA levels and/or serum TTR protein levels up to 22 days, wherein the concentration of the dsRNA is 6 mg/kg or 3 mg/kg. In yet another related embodiment, the dsRNA is formulated in a LNP09 formulation as follows: using XTC/DSPC/Chol/PEG2000-C14 in a ratio of 50/10/38.5/1.5 mol % and a lipid:siRNA ratio of about 11:1. In yet another related embodiment, the dsRNA is formulated in a LNP11 formulation as follows: using MC3/DSPC/Chol/PEG2000-C14 in a ratio of 50/10/38.5/1.5 mol % and a lipid:siRNA ratio of about 11:1. In yet another related embodiment, the dsRNA is formulated in a LNP09 formulation or a LNP11 formulation and reduces TTR mRNA levels by about 85 to 90% at a dose of 0.3 mg/kg, relative to a PBC control group. In yet another related embodiment, the dsRNA is formulated in a LNP09 formulation or a LNP11 formulation and reduces TTR mRNA levels by about 50% at a dose of 0.1 mg/kg, relative to a PBC control group. In still another related embodiment, the dsRNA is formulated in a LNP09 formulation or a LNP11 formulation and reduces TTR protein levels in a dose-dependent manner relative to a PBC control group as measured by a western blot. In still another related embodiment, administration of the dsRNA suppresses serum TTR protein levels up to day 14 post-treatment when administered to human at 1 mg/kg or 3 mg/kg. In still another related embodiment, the dsRNA is formulated in a SNALP formulation as follows: using DlinDMA with a DLinDMA/DPPC/Cholesterol/PEG2000-cDMA in a ratio of 57.1/7.1/34.4/1.4 and a lipid:siRNA ratio of about 7.

[0021] In another embodiment, the invention provides the use of a dsRNA for treating a disorder mediated by TTR expression comprising administering to a human in need of such treatment a therapeutically effective amount of any of the dsRNAs described in the Summary, above. In related embodiments, the dsRNA is administered to the human at about 0.01, 0.1, 0.5, 1.0, 2.5, or 5.0 mg/kg. In a particular related embodiment, the dsRNA is administered to the human at about 1.0 mg/kg. In another related embodiment, the human has transthyretin amyloidosis, and/or a liver disorder. In yet another embodiment of the use provided by the invention, the treated human is further provided a liver transplant.

[0022] In yet another embodiment, the invention provides the use of a dsRNA in a method for inhibiting TTR expression in a cell, wherein the method comprises (a) contacting the cell with a dsRNA described in the Summary, above; and (b) maintaining the cell produced in step (a) for a time sufficient to obtain degradation of the mRNA transcript of a TTR gene, thereby inhibiting expression of the TTR gene in the cell.

[0023] The details of one or more embodiments of the invention are set forth in the description below. Other features, objects, and advantages of the invention will be apparent from the description and the drawings, and from the claims.

### DESCRIPTION OF THE DRAWINGS

[0024] FIG. 1 is a graph of TNFalpha and IFNalpha levels in cultured human PBMCs following transfection with TTR siRNAs.

[0025] FIGS. 2A and 2B are dose response curves for AD-18324 and AD-18328, respectively, in HepG2 cells.

[0026] FIG. 3 is a dose response curve for AD-18246 in HepG2 cells.

[0027] FIG. 4A and FIG. 4B show inhibition of liver mRNA and plasma protein levels, respectively, in transgenic H129-mTTR-KO/iNOS-KO/hTTR mice by an intravenous bolus administration of TTR-dsRNA (AD-18324, AD-18328 and AD-18246) formulated in LNP01.

[0028] FIG. 5 is a graph summarizing the measurements of TTR mRNA levels in livers of non-human primates following 15-minute intravenous infusion of TTR-dsRNA (AD-18324 and AD-18328) formulated in SNALP.

[0029] FIG. 6A and FIG. 6B show inhibition of human V30M TTR liver mRNA and serum protein levels, respectively, in transgenic mice by an intravenous bolus administration of SNALP-18328. Group means were determined, normalized to the PBS control group, and then plotted. Error bars represent standard deviations. The percentage reduction of the group mean, relative to PBS, is indicated for the SNALP-1955 and SNALP-18328 groups. (*** p<0.001, One-way ANOVA, with Dunn's post-hoc test).

[0030] FIG. 7A and FIG. 7B show the durability of reduction of human V30M TTR liver mRNA and serum protein levels, respectively, in transgenic mice over 22 days following a single intravenous bolus administration of SNALP-18328. Group means were determined. TTR/GAPDH mRNA levels were normalized to day 0 levels and plotted. The percent reduction of normalized TTR mRNA levels relative to SNALP-1955 for each time point were calculated and are indicated for the SNALP-18328 groups. (*** p<0.001, One-way ANOVA, with Dunn's post-hoc test).

[0031] FIG. 8 shows the timecourse of TTR serum protein levels in non-human primates over 14 days following a single 15-minute intravenous infusion of SNALP-18328.

[0032] FIG. 9 shows reduction of TTR-immunoreactivity in various tissues of human V30M TTR/HSF-1 knock-out mice following intravenous bolus administration of SNALP-18328. E, esophagus; S, stomach; I1, intestine/duodenum; 14, intestine/colon; N, nerve; D, dorsal root ganglia.

[0033] FIG. 10 shows the measurements of TTR mRNA levels in livers of non-human primates following 15-minute intravenous infusion of XTC-SNALP-18328.

[0034] FIGS. 11A and 11B show the measurements of TTR mRNA and serum protein levels, respectively, in livers of non-human primates following 15-minute intravenous infusion of LNP09-18328 or LNP11-18328. FIG. 11C shows the timecourse of TTR serum protein levels over 28 days following a 15-minute intravenous infusion of 0.3 mg/kg LNP09-18328, as compared to the PBS control group.

[0035] FIG. 12 shows the sequence of human TTR mRNA (Ref. Seq. NM_000371.3, SEQ ID NO: 1331).

[0036] FIGS. 13A and 13B are the sequences of human and rat TTR mRNA, respectively. FIG. 13A is the sequence of human TTR mRNA (Ref. Seq. NM_000371.2, SEQ ID NO:1329). FIG. 13B is the sequence of rat TTR mRNA (Ref. Seq. NM_012681.1, SEQ ID NO:1330).

[0037] FIG. 14 shows the nucleotide alignment of NM_000371.3 (SEQ ID NO: 1331), NM_000371.2 (SEQ ID NO: 1329), and AD-18328 (SEQ ID NO: 1410).

[0038] FIG. 15 illustrates symptoms and mutations in TTR associated with familial amyloidotic neuropathy, familial amyloidotic cardiomyopathy and CNS amyloidosis.

[0039] FIG. 16 shows reduction of TTR mRNA levels in the liver with SNALP-18534 with different infusion durations. Groups of animals (n=4/group) were administered 1 mg/kg SNALP-18534 via a 15-minute, or 1, 2, or 3 hour infusion. Forty-eight hours later, rats were euthanized and livers harvested. TTR and GAPDH mRNA levels were measured from liver lysates using the Quantigene bDNA assay. The ratio of TTR to GAPDH mRNA levels was calculated for each animal. Group means were determined and normalized to a PBS control group, and then plotted. Error bars represent standard deviations. (*** p<0.001, One-way ANOVA with Bonferroni post-hoc test, relative to PBS).

[0040] FIG. 17 shows the measurements of TTR mRNA levels in livers of rats following 15-minute intravenous infusion of LNP07-18534 or LNP08-18534.

[0041] FIG. 18 shows in vivo inhibition of endogenous TTR mRNA levels in livers of Sprague-Dawley Rats following a 15-min IV infusion of LNP09-18534 or LNP11-18534. Groups of animals (n=4/group) were intravenously administered 0.01, 0.03, 0.1, or 0.3 mg/kg LNP09-18534, LNP-11-18534; or PBS via a 15-minute infusion. Forty-eight hours later, animals were euthanized and livers harvested. TTR and GAPDH mRNA levels were measured from liver biopsy lysates using the Quantigene bDNA assay. The ratio of TTR to GAPDH mRNA levels was calculated for each animal. Group means were determined, normalized to the PBS control group, and then plotted. Error bars represent standard deviations.

### DETAILED DESCRIPTION OF THE INVENTION

[0042] The invention provides dsRNAs and methods of using the dsRNAs for inhibiting the expression of a TTR gene in a cell or a mammal where the dsRNA targets a TTR gene. The invention also provides compositions and methods for treating pathological conditions and diseases, such as a TTR amyloidosis, in a mammal caused by the expression of a TTR gene. dsRNA directs the sequence-specific degradation of mRNA through a process known as RNA interference (RNAi).

[0043] The dsRNAs of the compositions featured herein include an RNA strand (the antisense strand) having a region which is less than 30 nucleotides in length, generally 19-24 nucleotides in length, and is substantially complementary to at least part of an mRNA transcript of a TTR gene. The use of these dsRNAs enables the targeted degradation of mRNAs of genes that are implicated in pathologies associated with TTR expression in mammals. Very low dosages of TTR dsRNAs in particular can specifically and efficiently mediate RNAi, resulting in significant inhibition of expression of a TTR gene. Using cell-based assays, the present inventors have demonstrated that dsRNAs targeting TTR can specifically and efficiently mediate RNAi, resulting in significant inhibition of expression of a TTR gene. Thus, methods and compositions including these dsRNAs are useful for treating pathological processes that can be mediated by down regulating TTR, such as in the treatment of a liver disorder or a TTR amyloidosis, e.g., FAP.

[0044] The methods and compositions containing a TTR dsRNA are useful for treating pathological processes mediated by TTR expression, such as a TTR amyloidosis. In an embodiment, a method of treating a disorder mediated by TTR expression includes administering to a human in need of such treatment a therapeutically effective amount of a dsRNA targeted to TTR. In an embodiment, a dsRNA is administered to the human at about 0.01, 0.1, 0.5, 1.0, 2, 2.5, 3, 4, 5, 6, 7, 8, 9, 10, 11, 12, 13, 14, 15, 16, 17, 18, 19, 20, 21, 22, 23, 24, or 25 mg/kg.

[0045] The following detailed description discloses how to make and use the compositions containing dsRNAs to inhibit the expression of a TTR gene, as well as compositions and methods for treating diseases and disorders caused by the expression of this gene. The pharmaceutical compositions featured in the invention include a dsRNA having an antisense strand comprising a region of complementarity which is less than 30 nucleotides in length, generally 19-24 nucleotides in length, and is substantially complementary to at least part of an RNA transcript of a TTR gene, together with a pharmaceutically acceptable carrier. The compositions featured in the invention also include a dsRNA having an antisense strand having a region of complementarity which is less than 30 nucleotides in length, generally 19-24 nucleotides in length, and is substantially complementary to at least part of an RNA transcript of a TTR gene.

[0046] The sense strand of a dsRNA can include 15, 16, 17, 18, 19, 20, 21, or more contiguous nucleotides of SEQ ID NO: 169, SEQ ID NO:449, SEQ ID NO:729, or SEQ ID NO: 1009. The antisense strand of a dsRNA can include 15, 16, 17, 18, 19, 20, 21, or more contiguous nucleotides of SEQ ID NO:170, SEQ ID NO:450, SEQ ID NO:730, or SEQ ID NO:1010. In an embodiment, the sense strand of a dsRNA can consist of SEQ ID NO:449 or fragments thereof and the antisense strand can consist of SEQ ID NO:450 or fragments thereof. In an embodiment, the sense strand of a dsRNA can consist of SEQ ID NO:729 or fragments thereof and the antisense strand can consist of SEQ ID NO:730 or fragments thereof. In an embodiment, the sense strand of a dsRNA can consist of SEQ ID NO: 1009 or fragments thereof and the antisense strand can consist of SEQ ID NO:1010 or fragments thereof.

[0047] In an embodiment, a dsRNA can include at least 1, 2, 3, 4, 5, 6, 7, 8, 9, 10, or more modified nucleotides. In an embodiment, a modified nucleotide can include a 2′-O-methyl modified nucleotide, a nucleotide comprising a 5′-phosphorothioate group, and/or a terminal nucleotide linked to a cholesteryl derivative or dodecanoic acid bisdecylamide group. In an embodiment, a modified nucleotide can include a 2′-deoxy-2′-fluoro modified nucleotide, a 2′-deoxy-modified nucleotide, a locked nucleotide, an abasic nucleotide, 2′-amino-modified nucleotide, 2′-alkyl-modified nucleotide, morpholino nucleotide, a phosphoramidate, and/or a non-natural base comprising nucleotide.

[0048] In an embodiment, the region of complementary of a dsRNA is at least 10, 11, 12, 13, 14, 15, 16, 17, 18, 19, 20, 21, or more nucleotides in length. In an embodiment, the region of complementary includes 10, 11, 12, 13, 14, 15, 16, 17, 18, 19, 20, 21, or more contiguous nucleotides of SEQ ID NO:169.

[0049] In an embodiment, each strand of a dsRNA is 15, 16, 17, 18, 19, 20, 21, 22, 23, 24, 25, 26, 27, 28, 29, 30 or more nucleotides in length. In an embodiment, the dsRNA includes a sense strand, or 10, 11, 12, 13, 14, 15, 16, 17, 18, 19, 20, or 21 nucleotide fragment thereof, selected from Tables 3A, 3B, 4, 6A, 6B, 7, and 16, and an antisense strand, or 10, 11, 12, 13, 14, 15, 16, 17, 18, 19, 20, or 21 nucleotide fragment thereof, selected from Tables 3A, 3B, 4, 6A, 6B, 7, and 16.

[0050] In an embodiment, administration of a dsRNA to a cell results in about 40%, 45%, 50%, 55%, 60%, 65%, 70%, 75%, 80%, 90%, 95% or more inhibition of TTR mRNA expression as measured by a real time PCR assay. In an embodiment, administration of a dsRNA to a cell results in about 40% to 45%, 45% to 50%, 50% to 55%, 55% to 60%, 60% to 65%, 65% to 70%, 70% to 75%, 75% to 80%, 80% to 85%, 85% to 90%, 90% to 95% or more inhibition of TTR mRNA expression as measured by a real time PCR assay. In an embodiment, administration of a dsRNA to a cell results in about 40%, 45%, 50%, 55%, 60%, 65%, 70%, 75%, 80%, 90%, 95% or more inhibition of TTR mRNA expression as measured by a branched DNA assay. In an embodiment, administration of a dsRNA to a cell results in about 40% to 45%, 45% to 50%, 50% to 55%, 55% to 60%, 60% to 65%, 65% to 70%, 70% to 75%, 75% to 80%, 80% to 85%, 85% to 90%, 90% to 95% or more inhibition of TTR mRNA expression as measured by a branched DNA assay.

[0051] In an embodiment, a dsRNA has an IC50 of less than 0.01 pM, 0.1 pM, 1 pM, 5 pM, 10 pM, 100 pM, or 1000 pM. In an embodiment, a dsRNA has an ED50 of about 0.01, 0.1, 1, 5, or 10 mg/kg.

[0052] In an embodiment, administration of a dsRNA can reduce TTR mRNA by about 40%, 45%, 50%, 55%, 60%, 65%, 70%, 75%, 80%, 90%, 95% or more in cynomolgus monkeys. In an embodiment, administration of a dsRNA reduces liver TTR mRNA levels by about 40%, 45%, 50%, 55%, 60%, 65%, 70%, 75%, 80%, 90%, 95% or more or serum TTR protein levels by about 40%, 45%, 50%, 55%, 60%, 65%, 70%, 75%, 80%, 90%, 95% or more. In an embodiment, administration of a dsRNA reduces liver TTR mRNA levels and/or serum TTR protein levels up to 1, 2, 3, 4, 5, 6, 7, 8, 9, 10, 11, 12, 13, 14, 15, 16, 17, 18, 19, 20, 21, 22, 23, 24, 25, or more days.

[0053] In an embodiment, a dsRNA is formulated in a LNP formulation and reduces TTR mRNA levels by about 40%, 45%, 50%, 55%, 60%, 65%, 70%, 75%, 80%, 90%, 95% or more at a dose of 0.1, 0.2, 0.3, 0.4, 0.5, 0.6, 0.7, 0.8, 0.9, or 1 mg/kg, relative to a PBC control group. In an embodiment, a dsRNA is formulated in a LNP formulation and reduces TTR protein levels about 40%, 45%, 50%, 55%, 60%, 65%, 70%, 75%, 80%, 90%, 95% or more relative to a PBC control group as measured by a western blot. In an embodiment, a dsRNA suppresses serum TTR protein levels up to day 1, 2, 3, 4, 5, 6, 7, 8, 9, 10, 11, 12, 13, 14, 15, 16, 17, 18, 19, 20, 21, 22, 23, 24, or 25 post-treatment when administered to a subject in need thereof at 1, 2, 3, 4, 5, 6, 7, 8, 9, 10, 11, 12, 13, 14, 15, 16, 17, 18, 19, 20, 21, 22, 23, 24, or 25 mg/kg.

[0054] Accordingly, in some aspects, pharmaceutical compositions containing a TTR dsRNA and a pharmaceutically acceptable carrier, methods of using the compositions to inhibit expression of a TTR gene, and methods of using the pharmaceutical compositions to treat diseases caused by expression of a TTR gene are featured in the invention.

### I. Definitions

[0055] For convenience, the meaning of certain terms and phrases used in the specification, examples, and appended claims, are provided below. If there is an apparent discrepancy between the usage of a term in other parts of this specification and its definition provided in this section, the definition in this section shall prevail.

[0056] “G,” “C,” “A” and “U” each generally stand for a nucleotide that contains guanine, cytosine, adenine, and uracil as a base, respectively. “T” and “dT” are used interchangeably herein and refer to a deoxyribonucleotide wherein the nucleobase is thymine, e.g., deoxyribothymine. However, it will be understood that the term “ribonucleotide” or “nucleotide” or “deoxyribonucleotide” can also refer to a modified nucleotide, as further detailed below, or a surrogate replacement moiety. The skilled person is well aware that guanine, cytosine, adenine, and uracil may be replaced by other moieties without substantially altering the base pairing properties of an oligonucleotide comprising a nucleotide bearing such replacement moiety. For example, without limitation, a nucleotide comprising inosine as its base may base pair with nucleotides containing adenine, cytosine, or uracil. Hence, nucleotides containing uracil, guanine, or adenine may be replaced in the nucleotide sequences of the invention by a nucleotide containing, for example, inosine. Sequences comprising such replacement moieties are embodiments of the invention.

[0057] As used herein, “transthyretin” (“TTR”) refers to a gene in a cell. TTR is also known as ATTR, HsT2651, PALB, prealbumin, TBPA, and transthyretin (prealbumin, amyloidosis type I). The sequence of a human TTR mRNA transcript can be found at NM_000371. The sequence of mouse TTR mRNA can be found at NM_013697.2, and the sequence of rat TTR mRNA can be found at NM_012681.1.

[0058] As used herein, “target sequence” refers to a contiguous portion of the nucleotide sequence of an mRNA molecule formed during the transcription of a TTR gene, including mRNA that is a product of RNA processing of a primary transcription product.

[0059] As used herein, the term “strand comprising a sequence” refers to an oligonucleotide comprising a chain of nucleotides that is described by the sequence referred to using the standard nucleotide nomenclature.

[0060] As used herein, and unless otherwise indicated, the term “complementary,” when used to describe a first nucleotide sequence in relation to a second nucleotide sequence, refers to the ability of an oligonucleotide or polynucleotide comprising the first nucleotide sequence to hybridize and form a duplex structure under certain conditions with an oligonucleotide or polynucleotide comprising the second nucleotide sequence, as will be understood by the skilled person. Such conditions can, for example, be stringent conditions, where stringent conditions may include: 400 mM NaCl, 40 mM PIPES pH 6.4, 1 mM EDTA, 50° C. or 70° C. for 12-16 hours followed by washing. Other conditions, such as physiologically relevant conditions as may be encountered inside an organism, can apply. The skilled person will be able to determine the set of conditions most appropriate for a test of complementarity of two sequences in accordance with the ultimate application of the hybridized nucleotides.

[0061] This includes base-pairing of the oligonucleotide or polynucleotide comprising the first nucleotide sequence to the oligonucleotide or polynucleotide comprising the second nucleotide sequence over the entire length of the first and second nucleotide sequence. Such sequences can be referred to as “fully complementary” with respect to each other herein. However, where a first sequence is referred to as “substantially complementary” with respect to a second sequence herein, the two sequences can be fully complementary, or they may form one or more, but generally not more than 4, 3 or 2 mismatched base pairs upon hybridization, while retaining the ability to hybridize under the conditions most relevant to their ultimate application. However, where two oligonucleotides are designed to form, upon hybridization, one or more single stranded overhangs, such overhangs shall not be regarded as mismatches with regard to the determination of complementarity. For example, a dsRNA comprising one oligonucleotide 21 nucleotides in length and another oligonucleotide 23 nucleotides in length, wherein the longer oligonucleotide comprises a sequence of 21 nucleotides that is fully complementary to the shorter oligonucleotide, may yet be referred to as “fully complementary” for the purposes described herein.

[0062] “Complementary” sequences, as used herein, may also include, or be formed entirely from, non-Watson-Crick base pairs and/or base pairs formed from non-natural and modified nucleotides, in as far as the above requirements with respect to their ability to hybridize are fulfilled. Such non-Watson-Crick base pairs includes, but not limited to, G: U Wobble or Hoogstein base pairing.

[0063] The terms “complementary,” “fully complementary” and “substantially complementary” herein may be used with respect to the base matching between the sense strand and the antisense strand of a dsRNA, or between the antisense strand of a dsRNA and a target sequence, as will be understood from the context of their use.

[0064] As used herein, a polynucleotide that is “substantially complementary to at least part of” a messenger RNA (mRNA) refers to a polynucleotide that is substantially complementary to a contiguous portion of the mRNA of interest (e.g., an mRNA encoding TTR) including a 5′ UTR, an open reading frame (ORF), or a 3′ UTR. For example, a polynucleotide is complementary to at least a part of a TTR mRNA if the sequence is substantially complementary to a non-interrupted portion of an mRNA encoding TTR.

[0065] The term “double-stranded RNA” or “dsRNA,” as used herein, refers to a complex of ribonucleic acid molecules, having a duplex structure comprising two anti-parallel and substantially complementary, as defined above, nucleic acid strands. In general, the majority of nucleotides of each strand are ribonucleotides, but as described in detail herein, each or both strands can also include at least one non-ribonucleotide, e.g., a deoxyribonucleotide and/or a modified nucleotide. In addition, as used in this specification, “dsRNA” may include chemical modifications to ribonucleotides, including substantial modifications at multiple nucleotides and including all types of modifications disclosed herein or known in the art. Any such modifications, as used in an siRNA type molecule, are encompassed by “dsRNA” for the purposes of this specification and claims.

[0066] The two strands forming the duplex structure may be different portions of one larger RNA molecule, or they may be separate RNA molecules. Where the two strands are part of one larger molecule, and therefore are connected by an uninterrupted chain of nucleotides between the 3′-end of one strand and the 5′-end of the respective other strand forming the duplex structure, the connecting RNA chain is referred to as a “hairpin loop.” Where the two strands are connected covalently by means other than an uninterrupted chain of nucleotides between the 3′-end of one strand and the 5′-end of the respective other strand forming the duplex structure, the connecting structure is referred to as a “linker.” The RNA strands may have the same or a different number of nucleotides. The maximum number of base pairs is the number of nucleotides in the shortest strand of the dsRNA minus any overhangs that are present in the duplex. In addition to the duplex structure, a dsRNA may comprise one or more nucleotide overhangs. The term “siRNA” is also used herein to refer to a dsRNA as described above.

[0067] As used herein, a “nucleotide overhang” refers to the unpaired nucleotide or nucleotides that protrude from the duplex structure of a dsRNA when a 3′-end of one strand of the dsRNA extends beyond the 5′-end of the other strand, or vice versa. “Blunt” or “blunt end” means that there are no unpaired nucleotides at that end of the dsRNA, i.e., no nucleotide overhang. A “blunt ended” dsRNA is a dsRNA that is double-stranded over its entire length, i.e., no nucleotide overhang at either end of the molecule.

[0068] The term “antisense strand” refers to the strand of a dsRNA which includes a region that is substantially complementary to a target sequence. As used herein, the term “region of complementarity” refers to the region on the antisense strand that is substantially complementary to a sequence, for example a target sequence, as defined herein. Where the region of complementarity is not fully complementary to the target sequence, the mismatches are most tolerated in the terminal regions and, if present, are generally in a terminal region or regions, e.g., within 6, 5, 4, 3, or 2 nucleotides of the 5′ and/or 3′ terminus.

[0069] The term “sense strand,” as used herein, refers to the strand of a dsRNA that includes a region that is substantially complementary to a region of the antisense strand.

[0070] As used herein, the term “SNALP” refers to a stable nucleic acid-lipid particle. A SNALP represents a vesicle of lipids coating a reduced aqueous interior comprising a nucleic acid such as a dsRNA or a plasmid from which a dsRNA is transcribed. SNALP are described, e.g., in U.S. Patent Application Publication Nos. 20060240093, 20070135372, and U.S. Ser. No. 61/045,228 filed on Apr. 15, 2008. These applications are hereby incorporated by reference.

[0071] “Introducing into a cell,” when referring to a dsRNA, means facilitating uptake or absorption into the cell, as is understood by those skilled in the art. Absorption or uptake of dsRNA can occur through unaided diffusive or active cellular processes, or by auxiliary agents or devices. The meaning of this term is not limited to cells in vitro; a dsRNA may also be “introduced into a cell,” wherein the cell is part of a living organism. In such instance, introduction into the cell will include the delivery to the organism. For example, for in vivo delivery, dsRNA can be injected into a tissue site or administered systemically. In vitro introduction into a cell includes methods known in the art such as electroporation and lipofection. Further approaches are described herein or known in the art.

[0072] The terms “silence,” “inhibit the expression of,” “down-regulate the expression of,” “suppress the expression of” and the like in as far as they refer to a TTR gene, herein refer to the at least partial suppression of the expression of a TTR gene, as manifested by a reduction of the amount of mRNA which may be isolated from a first cell or group of cells in which a TTR gene is transcribed and which has or have been treated such that the expression of a TTR gene is inhibited, as compared to a second cell or group of cells substantially identical to the first cell or group of cells but which has or have not been so treated (control cells). The degree of inhibition is usually expressed in terms of

$$\frac{( mRNA in control cells ) - ( mRNA in treated cells )}{( mRNA in control cells )} \cdot 100 \%$$

[0073] Alternatively, the degree of inhibition may be given in terms of a reduction of a parameter that is functionally linked to TTR gene expression, e.g., the amount of protein encoded by a TTR gene which is secreted by a cell, or the number of cells displaying a certain phenotype, e.g., apoptosis. In principle, TTR gene silencing may be determined in any cell expressing the target, either constitutively or by genomic engineering, and by any appropriate assay. However, when a reference is needed in order to determine whether a given dsRNA inhibits the expression of a TTR gene by a certain degree and therefore is encompassed by the instant invention, the assays provided in the Examples below shall serve as such reference.

[0074] For example, in certain instances, expression of a TTR gene is suppressed by at least about 5%, 10%, 15%, 20%, 25%, 30%, 35%, 40%, 45%, or 50% by administration of the double-stranded oligonucleotide featured in the invention. In some embodiments, a TTR gene is suppressed by at least about 60%, 70%, or 80% by administration of the double-stranded oligonucleotide featured in the invention. In some embodiments, a TTR gene is suppressed by at least about 85%, 90%, or 95% by administration of the double-stranded oligonucleotide featured in the invention.

[0075] As used herein in the context of TTR expression, the terms “treat,” “treatment,” and the like, refer to relief from or alleviation of pathological processes mediated by TTR expression. In the context of the present invention insofar as it relates to any of the other conditions recited herein below (other than pathological processes mediated by TTR expression), the terms “treat,” “treatment,” and the like mean to relieve or alleviate at least one symptom associated with such condition, or to slow or reverse the progression of such condition, such as the slowing the progression of a TTR amyloidosis, such as FAP. Symptoms of TTR amyloidosis include sensory neuropathy (e.g. paresthesia, hypesthesia in distal limbs), autonomic neuropathy (e.g., gastrointestinal dysfunction, such as gastric ulcer, or orthostatic hypotension), motor neuropathy, seizures, dementia, myelopathy, polyneuropathy, carpal tunnel syndrome, autonomic insufficiency, cardiomyopathy, vitreous opacities, renal insufficiency, nephropathy, substantially reduced mBMI (modified Body Mass Index), cranial nerve dysfunction, and corneal lattice dystrophy.

[0076] As used herein, the phrases “therapeutically effective amount” and “prophylactically effective amount” refer to an amount that provides a therapeutic benefit in the treatment, prevention, or management of pathological processes mediated by TTR expression or an overt symptom of pathological processes mediated by TTR expression. The specific amount that is therapeutically effective can be readily determined by an ordinary medical practitioner, and may vary depending on factors known in the art, such as, for example, the type of pathological processes mediated by TTR expression, the patient's history and age, the stage of pathological processes mediated by TTR expression, and the administration of other anti-pathological processes mediated by TTR expression agents.

[0077] As used herein, a “pharmaceutical composition” comprises a pharmacologically effective amount of a dsRNA and a pharmaceutically acceptable carrier. As used herein, “pharmacologically effective amount,” “therapeutically effective amount” or simply “effective amount” refers to that amount of an RNA effective to produce the intended pharmacological, therapeutic or preventive result. For example, if a given clinical treatment is considered effective when there is at least a 25% reduction in a measurable parameter associated with a disease or disorder, a therapeutically effective amount of a drug for the treatment of that disease or disorder is the amount necessary to effect at least a 25% reduction in that parameter. For example, a therapeutically effective amount of a dsRNA targeting TTR can reduce TTR serum levels by at least 25%. In another example, a therapeutically effective amount of a dsRNA targeting TTR can improve liver function or renal function by at least 25%.

[0078] The term “pharmaceutically acceptable carrier” refers to a carrier for administration of a therapeutic agent. Such carriers include, but are not limited to, saline, buffered saline, dextrose, water, glycerol, ethanol, and combinations thereof. The term specifically excludes cell culture medium. For drugs administered orally, pharmaceutically acceptable carriers include, but are not limited to pharmaceutically acceptable excipients such as inert diluents, disintegrating agents, binding agents, lubricating agents, sweetening agents, flavoring agents, coloring agents and preservatives. Suitable inert diluents include sodium and calcium carbonate, sodium and calcium phosphate, and lactose, while corn starch and alginic acid are suitable disintegrating agents. Binding agents may include starch and gelatin, while the lubricating agent, if present, will generally be magnesium stearate, stearic acid or talc. If desired, the tablets may be coated with a material such as glyceryl monostearate or glyceryl distearate, to delay absorption in the gastrointestinal tract.

[0079] As used herein, a “transformed cell” is a cell into which a vector has been introduced from which a dsRNA molecule may be expressed.

### II. Double-Stranded Ribonucleic Acid (dsRNA)

[0080] As described in more detail herein, the invention provides double-stranded ribonucleic acid (dsRNA) molecules for inhibiting the expression of a TTR gene in a cell or mammal, e.g., in a human having a TTR amyloidosis, where the dsRNA includes an antisense strand having a region of complementarity which is complementary to at least a part of an mRNA formed in the expression of a TTR gene, and where the region of complementarity is less than 30 nucleotides in length, generally 19-24 nucleotides in length, and where said dsRNA, upon contact with a cell expressing said TTR gene, inhibits the expression of said TTR gene by at least 30% as assayed by, for example, a PCR or branched DNA (bDNA)-based method, or by a protein-based method, such as by Western blot. Expression of a TTR gene can be reduced by at least 30% when measured by an assay as described in the Examples below. For example, expression of a TTR gene in cell culture, such as in Hep3B cells, can be assayed by measuring TTR mRNA levels, such as by bDNA or TaqMan assay, or by measuring protein levels, such as by ELISA assay. The dsRNA of the invention can further include one or more single-stranded nucleotide overhangs.

[0081] The dsRNA can be synthesized by standard methods known in the art as further discussed below, e.g., by use of an automated DNA synthesizer, such as are commercially available from, for example, Biosearch, Applied Biosystems, Inc. The dsRNA includes two RNA strands that are sufficiently complementary to hybridize to form a duplex structure. One strand of the dsRNA (the antisense strand) includes a region of complementarity that is substantially complementary, and generally fully complementary, to a target sequence, derived from the sequence of an mRNA formed during the expression of a TTR gene, the other strand (the sense strand) includes a region that is complementary to the antisense strand, such that the two strands hybridize and form a duplex structure when combined under suitable conditions. Generally, the duplex structure is between 15 and 30 or between 25 and 30, or between 18 and 25, or between 19 and 24, or between 19 and 21, or 19, 20, or 21 base pairs in length. In one embodiment the duplex is 19 base pairs in length. In another embodiment the duplex is 21 base pairs in length. When two different siRNAs are used in combination, the duplex lengths can be identical or can differ.

[0082] Each strand of the dsRNA of invention is generally between 15 and 30, or between 18 and 25, or 18, 19, 20, 21, 22, 23, 24, or 25 nucleotides in length. In other embodiments, each is strand is 25-30 nucleotides in length. Each strand of the duplex can be the same length or of different lengths. When two different siRNAs are used in combination, the lengths of each strand of each siRNA can be identical or can differ.

[0083] The dsRNA of the invention can include one or more single-stranded overhang(s) of one or more nucleotides. In one embodiment, at least one end of the dsRNA has a single-stranded nucleotide overhang of 1 to 4, generally 1 or 2 nucleotides. In another embodiment, the antisense strand of the dsRNA has 1-10 nucleotides overhangs each at the 3′ end and the 5′ end over the sense strand. In further embodiments, the sense strand of the dsRNA has 1-10 nucleotides overhangs each at the 3′ end and the 5′ end over the antisense strand.

[0084] A dsRNAs having at least one nucleotide overhang can have unexpectedly superior inhibitory properties than the blunt-ended counterpart. In some embodiments the presence of only one nucleotide overhang strengthens the interference activity of the dsRNA, without affecting its overall stability. A dsRNA having only one overhang has proven particularly stable and effective in vivo, as well as in a variety of cells, cell culture mediums, blood, and serum. Generally, the single-stranded overhang is located at the 3′-terminal end of the antisense strand or, alternatively, at the 3′-terminal end of the sense strand. The dsRNA can also have a blunt end, generally located at the 5′-end of the antisense strand. Such dsRNAs can have improved stability and inhibitory activity, thus allowing administration at low dosages, i.e., less than 5 mg/kg body weight of the recipient per day. Generally, the antisense strand of the dsRNA has a nucleotide overhang at the 3′-end, and the 5′-end is blunt. In another embodiment, one or more of the nucleotides in the overhang is replaced with a nucleoside thiophosphate.

[0085] In one embodiment, a TTR gene is a human TTR gene. In specific embodiments, the sense strand of the dsRNA is one of the sense sequences from Tables 3A, 3B, 4, 6A, 6B, or 7, and the antisense strand is one of the antisense sequences of Tables 3A, 3B, 4, 6A, 6B, or 7. Alternative antisense agents that target elsewhere in the target sequence provided in Tables 3A, 3B, 4, 6A, 6B, or 7 can readily be determined using the target sequence and the flanking TTR sequence.

[0086] The skilled person is well aware that dsRNAs having a duplex structure of between 20 and 23, but specifically 21, base pairs have been hailed as particularly effective in inducing RNA interference (Elbashir et al., EMBO 2001, 20:6877-6888). However, others have found that shorter or longer dsRNAs can be effective as well. In the embodiments described above, by virtue of the nature of the oligonucleotide sequences provided in Tables 3A, 3B, 4, 6A, 6B, and 7, the dsRNAs featured in the invention can include at least one strand of a length described herein. It can be reasonably expected that shorter dsRNAs having one of the sequences of Tables 3A, 3B, 4, 6A, 6B, or 7 minus only a few nucleotides on one or both ends may be similarly effective as compared to the dsRNAs described above. Hence, dsRNAs having a partial sequence of at least 15, 16, 17, 18, 19, 20, or more contiguous nucleotides from one of the sequences of Tables 3, 4, 6 or 7, and differing in their ability to inhibit the expression of a TTR gene in an assay as described herein below by not more than 5, 10, 15, 20, 25, or 30% inhibition from a dsRNA comprising the full sequence, are contemplated by the invention. Further, dsRNAs that cleave within a desired TTR target sequence can readily be made using the corresponding TTR antisense sequence and a complementary sense sequence.

[0087] In addition, the dsRNAs provided in Tables 3A, 3B, 4, 6A, 6B, or 7 identify a site in a TTR that is susceptible to RNAi based cleavage. As such, the present invention further features dsRNAs that target within the sequence targeted by one of the agents of the present invention. As used herein, a second dsRNA is said to target within the sequence of a first dsRNA if the second dsRNA cleaves the message anywhere within the mRNA that is complementary to the antisense strand of the first dsRNA. Such a second dsRNA will generally consist of at least 15 contiguous nucleotides from one of the sequences provided in Tables 3A, 3B, 4, 6A, 6B, or 7 coupled to additional nucleotide sequences taken from the region contiguous to the selected sequence in a TTR gene.

[0088] The dsRNA featured in the invention can contain one or more mismatches to the target sequence. In one embodiment, the dsRNA featured in the invention contains no more than 3 mismatches. If the antisense strand of the dsRNA contains mismatches to a target sequence, it is preferable that the area of mismatch not be located in the center of the region of complementarity. If the antisense strand of the dsRNA contains mismatches to the target sequence, it is preferable that the mismatch be restricted to 5 nucleotides from either end, for example 5, 4, 3, 2, or 1 nucleotide from either the 5′ or 3′ end of the region of complementarity. For example, for a 23 nucleotide dsRNA strand which is complementary to a region of a TTR gene, the dsRNA generally does not contain any mismatch within the central 13 nucleotides. The methods described within the invention can be used to determine whether a dsRNA containing a mismatch to a target sequence is effective in inhibiting the expression of a TTR gene. Consideration of the efficacy of dsRNAs with mismatches in inhibiting expression of a TTR gene is important, especially if the particular region of complementarity in a TTR gene is known to have polymorphic sequence variation within the population.

### Modifications

[0089] In yet another embodiment, the dsRNA is chemically modified to enhance stability. The nucleic acids featured in the invention may be synthesized and/or modified by methods well established in the art, such as those described in “Current protocols in nucleic acid chemistry,” Beaucage, S. L. et al. (Eds.), John Wiley & Sons, Inc., New York, NY, USA, which is hereby incorporated herein by reference. Specific examples of dsRNA compounds useful in this invention include dsRNAs containing modified backbones or no natural internucleoside linkages. As defined in this specification, dsRNAs having modified backbones include those that retain a phosphorus atom in the backbone and those that do not have a phosphorus atom in the backbone. For the purposes of this specification, and as sometimes referenced in the art, modified dsRNAs that do not have a phosphorus atom in their internucleoside backbone can also be considered to be oligonucleosides.

[0090] Modified dsRNA backbones include, for example, phosphorothioates, chiral phosphorothioates, phosphorodithioates, phosphotriesters, aminoalkylphosphotriesters, methyl and other alkyl phosphonates including 3′-alkylene phosphonates and chiral phosphonates, phosphinates, phosphoramidates including 3′-amino phosphoramidate and aminoalkylphosphoramidates, thionophosphoramidates, thionoalkylphosphonates, thionoalkylphosphotriesters, and boranophosphates having normal 3′-5′ linkages, 2′-5′ linked analogs of these, and those) having inverted polarity wherein the adjacent pairs of nucleoside units are linked 3′-5′ to 5′-3′ or 2′-5′ to 5′-2′. Various salts, mixed salts and free acid forms are also included.

[0091] Representative U.S. patents that teach the preparation of the above phosphorus-containing linkages include, but are not limited to, U.S. Pat. Nos. 3,687,808; 4,469,863; 4,476,301; 5,023,243; 5,177,195; 5,188,897; 5,264,423; 5,276,019; 5,278,302; 5,286,717; 5,321,131; 5,399,676; 5,405,939; 5,453,496; 5,455,233; 5,466,677; 5,476,925; 5,519,126; 5,536,821; 5,541,316; 5,550,111; 5,563,253; 5,571,799; 5,587,361; and 5,625,050, each of which is herein incorporated by reference

[0092] Modified dsRNA backbones that do not include a phosphorus atom therein have backbones that are formed by short chain alkyl or cycloalkyl internucleoside linkages, mixed heteroatoms and alkyl or cycloalkyl internucleoside linkages, or ore or more short chain heteroatomic or heterocyclic internucleoside linkages. These include those having morpholino linkages (formed in part from the sugar portion of a nucleoside); siloxane backbones; sulfide, sulfoxide and sulfone backbones; formacetyl and thioformacetyl backbones; methylene formacetyl and thioformacetyl backbones; alkene containing backbones; sulfamate backbones; methyleneimino and methylenehydrazino backbones; sulfonate and sulfonamide backbones; amide backbones; and others having mixed N, O, S and CH₂ component parts.

[0093] Representative U.S. patents that teach the preparation of the above oligonucleosides include, but are not limited to, U.S. Pat. Nos. 5,034,506; 5,166,315; 5,185,444; 5,214,134; 5,216,141; 5,235,033; 5,64,562; 5,264,564; 5,405,938; 5,434,257; 5,466,677; 5,470,967; 5,489,677; 5,541,307; 5,561,225; 5,596,086; 5,602,240; 5,608,046; 5,610,289; 5,618,704; 5,623,070; 5,663,312; 5,633,360; 5,677,437; and, 5,677,439, each of which is herein incorporated by reference.

[0094] In other suitable dsRNA mimetics, both the sugar and the internucleoside linkage, i.e., the backbone, of the nucleotide units are replaced with novel groups. The base units are maintained for hybridization with an appropriate nucleic acid target compound. One such oligomeric compound, a dsRNA mimetic that has been shown to have excellent hybridization properties, is referred to as a peptide nucleic acid (PNA). In PNA compounds, the sugar backbone of a dsRNA is replaced with an amide containing backbone, in particular an aminoethylglycine backbone. The nucleobases are retained and are bound directly or indirectly to aza nitrogen atoms of the amide portion of the backbone. Representative U.S. patents that teach the preparation of PNA compounds include, but are not limited to, U.S. Pat. Nos. 5,539,082; 5,714,331; and 5,719,262, each of which is herein incorporated by reference. Further teaching of PNA compounds can be found in Nielsen et al., Science, 1991, 254, 1497-1500.

[0095] Other embodiments of the invention are dsRNAs with phosphorothioate backbones and oligonucleosides with heteroatom backbones, and in particular —CH₂—NH—CH₂—, —CH₂—N(CH₃)—O—CH₂-[known as a methylene (methylimino) or MMI backbone], —CH₂—O—N(CH₃)—CH₂—, —CH₂—N(CH₃)—N(CH₃)—CH₂— and —N(CH₃)—CH₂—CH₂-[wherein the native phosphodiester backbone is represented as —O—P—O—CH₂—] of the above-referenced U.S. Pat. No. 5,489,677, and the amide backbones of the above-referenced U.S. Pat. No. 5,602,240. Also preferred are dsRNAs having morpholino backbone structures of the above-referenced U.S. Pat. No. 5,034,506.

[0096] Modified dsRNAs may also contain one or more substituted sugar moieties. Preferred dsRNAs comprise one of the following at the 2′ position: OH; F; O—, S—, or N-alkyl; O—, S—, or N-alkenyl; O-, S- or N-alkynyl; or O-alkyl-O-alkyl, wherein the alkyl, alkenyl and alkynyl may be substituted or unsubstituted C₁ to C₁₀ alkyl or C₂ to C₁₀ alkenyl and alkynyl. Particularly preferred are O[(CH₂)ₙO]ₘCH₃, O(CH₂)ₙOCH₃, O(CH₂)ₙNH₂, O(CH₂)ₙCH₃, O(CH₂)ₙONH₂, and O(CH₂)ₙON[(CH₂)ₙCH₃)]₂, where n and m are from 1 to about 10. Other preferred dsRNAs comprise one of the following at the 2′ position: C₁ to C₁₀ lower alkyl, substituted lower alkyl, alkaryl, aralkyl, O-alkaryl or O-aralkyl, SH, SCH₃, OCN, Cl, Br, CN, CF₃, OCF₃, SOCH₃, SO₂CH₃, ONO₂, NO₂, N₃, NH₂, heterocycloalkyl, heterocycloalkaryl, aminoalkylamino, polyalkylamino, substituted silyl, an RNA cleaving group, a reporter group, an intercalator, a group for improving the pharmacokinetic properties of an dsRNA, or a group for improving the pharmacodynamic properties of an dsRNA, and other substituents having similar properties. A preferred modification includes 2′-methoxyethoxy (2′-O—CH₂CH₂OCH₃, also known as 2′-O-(2-methoxyethyl) or 2′-MOE) (Martin et al., Helv. Chim. Acta, 1995, 78, 486-504) i.e., an alkoxy-alkoxy group. A further preferred modification includes 2′-dimethylaminooxyethoxy, i.e., a O(CH₂)₂ON(CH₃)₂ group, also known as 2′-DMAOE, as described in examples herein below, and 2′-dimethylaminoethoxyethoxy (also known in the art as 2′-O-dimethylaminoethoxyethyl or 2′-DMAEOE), i.e., 2′-O—CH₂—O—CH₂—N(CH₂)₂, also described in examples herein below.

[0097] Other preferred modifications include 2′-methoxy (2′-OCH₃), 2′-aminopropoxy (2′-OCH₂CH₂CH₂NH₂) and 2′-fluoro (2′-F). Similar modifications may also be made at other positions on the dsRNA, particularly the 3′ position of the sugar on the 3′ terminal nucleotide or in 2′-5′ linked dsRNAs and the 5′ position of 5′ terminal nucleotide. DsRNAs may also have sugar mimetics such as cyclobutyl moieties in place of the pentofuranosyl sugar. Representative U.S. patents that teach the preparation of such modified sugar structures include, but are not limited to, U.S. Pat. Nos. 4,981,957; 5,118,800; 5,319,080; 5,359,044; 5,393,878; 5,446,137; 5,466,786; 5,514,785; 5,519,134; 5,567,811; 5,576,427; 5,591,722; 5,597,909; 5,610,300; 5,627,053; 5,639,873; 5,646,265; 5,658,873; 5,670,633; and 5,700,920, certain of which are commonly owned with the instant application, and each of which is herein incorporated by reference in its entirety.

[0098] dsRNAs may also include nucleobase (often referred to in the art simply as “base”) modifications or substitutions. As used herein, “unmodified” or “natural” nucleobases include the purine bases adenine (A) and guanine (G), and the pyrimidine bases thymine (T), cytosine (C) and uracil (U). Modified nucleobases include other synthetic and natural nucleobases such as 5-methylcytosine (5-me-C), 5-hydroxymethyl cytosine, xanthine, hypoxanthine, 2-aminoadenine, 6-methyl and other alkyl derivatives of adenine and guanine, 2-propyl and other alkyl derivatives of adenine and guanine, 2-thiouracil, 2-thiothymine and 2-thiocytosine, 5-halouracil and cytosine, 5-propynyl uracil and cytosine, 6-azo uracil, cytosine and thymine, 5-uracil (pseudouracil), 4-thiouracil, 8-halo, 8-amino, 8-thiol, 8-thioalkyl, 8-hydroxyl anal other 8-substituted adenines and guanines, 5-halo, particularly 5-bromo, 5-trifluoromethyl and other 5-substituted uracils and cytosines, 7-methylguanine and 7-methyladenine, 8-azaguanine and 8-azaadenine, 7-deazaguanine and 7-daazaadenine and 3-deazaguanine and 3-deazaadenine. Further nucleobases include those disclosed in U.S. Pat. No. 3,687,808, those disclosed in The Concise Encyclopedia Of Polymer Science And Engineering, pages 858-859, Kroschwitz, J. L, ed. John Wiley & Sons, 1990, these disclosed by Englisch et al., Angewandte Chemie, International Edition, 1991, 30, 613, and those disclosed by Sanghvi, Y S., Chapter 15, DsRNA Research and Applications, pages 289-302, Crooke, S. T. and Lebleu, B., Ed., CRC Press, 1993. Certain of these nucleobases are particularly useful for increasing the binding affinity of the oligomeric compounds featured in the invention. These include 5-substituted pyrimidines, 6-azapyrimidines and N-2, N-6 and 0-6 substituted purines, including 2-aminopropyladenine, 5-propynyluracil and 5-propynylcytosine. 5-methylcytosine substitutions have been shown to increase nucleic acid duplex stability by 0.6-1.2° C. (Sanghvi, Y. S., Crooke, S. T. and Lebleu, B., Eds., DsRNA Research and Applications, CRC Press, Boca Raton, 1993, pp. 276-278) and are exemplary base substitutions, even more particularly when combined with 2′-O-methoxyethyl sugar modifications.

[0099] Representative U.S. patents that teach the preparation of certain of the above noted modified nucleobases as well as other modified nucleobases include, but are not limited to, the above noted U.S. Pat. No. 3,687,808, as well as U.S. Pat. Nos. 4,845,205; 5,130,30; 5,134,066; 5,175,273; 5,367,066; 5,432,272; 5,457,187; 5,459,255; 5,484,908; 5,502,177; 5,525,711; 5,552,540; 5,587,469; 5,594,121, 5,596,091; 5,614,617; and 5,681,941, each of which is herein incorporated by reference, and U.S. Pat. No. 5,750,692, also herein incorporated by reference.

### Conjugates

[0100] Another modification of the dsRNAs of the invention involves chemically linking to the dsRNA one or more moieties or conjugates which enhance the activity, cellular distribution or cellular uptake of the dsRNA. Such moieties include but are not limited to lipid moieties such as a cholesterol moiety (Letsinger et al., Proc. Natl. Acid. Sci. USA, 1989, 86:6553-6556), cholic acid (Manoharan et al., Biorg. Med. Chem. Let., 1994, 4:1053-1060), a thioether, e.g., beryl-S-tritylthiol (Manoharan et al., Ann. N.Y. Acad. Sci., 1992, 660:306-309; Manoharan et al., Biorg. Med. Chem. Let., 1993, 3:2765-2770), a thiocholesterol (Oberhauser et al., Nucl. Acids Res., 1992, 20:533-538), an aliphatic chain, e.g., dodecandiol or undecyl residues (Saison-Behmoaras et al., EMBO J, 1991, 10:1111-1118; Kabanov et al., FEBS Lett., 1990, 259:327-330; Svinarchuk et al., Biochimie, 1993, 75:49-54), a phospholipid, e.g., di-hexadecyl-rac-glycerol or triethyl-ammonium 1,2-di-O-hexadecyl-rac-glycero-3-Hphosphonate (Manoharan et al., Tetrahedron Lett., 1995, 36:3651-3654; Shea et al., Nucl. Acids Res., 1990, 18:3777-3783), a polyamine or a polyethylene glycol chain (Manoharan et al., Nucleosides & Nucleotides, 1995, 14:969-973), or adamantane acetic acid (Manoharan et al., Tetrahedron Lett., 1995, 36:3651-3654), a palmityl moiety (Mishra et al., Biochim. Biophys. Acta, 1995, 1264:229-237), or an octadecylamine or hexylamino-carbonyloxycholesterol moiety (Crooke et al., J. Pharmacol. Exp. Ther., 1996, 277:923-937).

[0101] Representative U.S. patents that teach the preparation of such dsRNA conjugates include, but are not limited to, U.S. Pat. Nos. 4,828,979; 4,948,882; 5,218,105; 5,525,465; 5,541,313; 5,545,730; 5,552,538; 5,578,717, 5,580,731; 5,591,584; 5,109,124; 5,118,802; 5,138,045; 5,414,077; 5,486,603; 5,512,439; 5,578,718; 5,608,046; 4,587,044; 4,605,735; 4,667,025; 4,762,779; 4,789,737; 4,824,941; 4,835,263; 4,876,335; 4,904,582; 4,958,013; 5,082,830; 5,112,963; 5,214,136; 5,082,830; 5,112,963; 5,214,136; 5,245,022; 5,254,469; 5,258,506; 5,262,536; 5,272,250; 5,292,873; 5,317,098; 5,371,241, 5,391,723; 5,416,203, 5,451,463; 5,510,475; 5,512,667; 5,514,785; 5,565,552; 5,567,810; 5,574,142; 5,585,481; 5,587,371; 5,595,726; 5,597,696; 5,599,923; 5,599,928 and 5,688,941, each of which is herein incorporated by reference.

[0102] It is not necessary for all positions in a given compound to be uniformly modified, and in fact more than one of the aforementioned modifications may be incorporated in a single compound or even at a single nucleoside within a dsRNA. The present invention also includes dsRNA compounds which are chimeric compounds. “Chimeric” dsRNA compounds or “chimeras,” in the context of this invention, are dsRNA compounds, particularly dsRNAs, which contain two or more chemically distinct regions, each made up of at least one monomer unit, i.e., a nucleotide in the case of a dsRNA compound. These dsRNAs typically contain at least one region wherein the dsRNA is modified so as to confer upon the dsRNA increased resistance to nuclease degradation, increased cellular uptake, and/or increased binding affinity for the target nucleic acid. An additional region of the dsRNA may serve as a substrate for enzymes capable of cleaving RNA: DNA or RNA: RNA hybrids. By way of example, RNase H is a cellular endonuclease which cleaves the RNA strand of an RNA: DNA duplex. Activation of RNase H, therefore, results in cleavage of the RNA target, thereby greatly enhancing the efficiency of dsRNA inhibition of gene expression. Consequently, comparable results can often be obtained with shorter dsRNAs when chimeric dsRNAs are used, compared to phosphorothioate deoxydsRNAs hybridizing to the same target region.

[0103] Cleavage of the RNA target can be routinely detected by gel electrophoresis and, if necessary, associated nucleic acid hybridization techniques known in the art. The cleavage site on the target mRNA of a dsRNA can be determined using methods generally known to one of ordinary skill in the art, e.g., the 5′-RACE method described in Soutschek et al., Nature; 2004, Vol. 432, pp. 173-178 (which is herein incorporated by reference for all purposes). In an embodiment, using the 5′-RACE method described by Soutschek et al., ALN-18328 was determined to cleave a TTR mRNA between the guanine nucleotide at position 636 of SEQ ID NO: 1331 (NM_000371.3) and the adenine nucleotide at position 637 of SEQ ID NO:1331. In an embodiment, it was determined that ALN-18328 does not cleave a TTR mRNA between the adenine nucleotide at position 637 of SEQ ID NO:1331 and the guanine nucleotide at position 638 of SEQ ID NO:1331.

[0104] In certain instances, the dsRNA may be modified by a non-ligand group. A number of non-ligand molecules have been conjugated to dsRNAs in order to enhance the activity, cellular distribution or cellular uptake of the dsRNA, and procedures for performing such conjugations are available in the scientific literature. Such non-ligand moieties have included lipid moieties, such as cholesterol (Letsinger et al., Proc. Natl. Acad. Sci. USA, 1989, 86:6553), cholic acid (Manoharan et al., Bioorg. Med. Chem. Lett., 1994, 4:1053), a thioether, e.g., hexyl-S-tritylthiol (Manoharan et al., Ann. N.Y. Acad. Sci., 1992, 660:306; Manoharan et al., Bioorg. Med. Chem. Let., 1993, 3:2765), a thiocholesterol (Oberhauser et al., Nucl. Acids Res., 1992, 20:533), an aliphatic chain, e.g., dodecandiol or undecyl residues (Saison-Behmoaras et al., EMBO J., 1991, 10:111; Kabanov et al., FEBS Lett., 1990, 259:327; Svinarchuk et al., Biochimie, 1993, 75:49), a phospholipid, e.g., di-hexadecyl-rac-glycerol or triethylammonium 1,2-di-O-hexadecyl-rac-glycero-3-H-phosphonate (Manoharan et al., Tetrahedron Lett., 1995, 36:3651; Shea et al., Nucl. Acids Res., 1990, 18:3777), a polyamine or a polyethylene glycol chain (Manoharan et al., Nucleosides & Nucleotides, 1995, 14:969), or adamantane acetic acid (Manoharan et al., Tetrahedron Lett., 1995, 36:3651), a palmityl moiety (Mishra et al., Biochim. Biophys. Acta, 1995, 1264:229), or an octadecylamine or hexylamino-carbonyl-oxycholesterol moiety (Crooke et al., J. Pharmacol. Exp. Ther., 1996, 277:923). Representative United States patents that teach the preparation of such dsRNA conjugates have been listed above. Typical conjugation protocols involve the synthesis of dsRNAs bearing an aminolinker at one or more positions of the sequence. The amino group is then reacted with the molecule being conjugated using appropriate coupling or activating reagents. The conjugation reaction may be performed either with the dsRNA still bound to the solid support or following cleavage of the dsRNA in solution phase. Purification of the dsRNA conjugate by HPLC typically affords the pure conjugate.

Vector Encoded dsRNAs

[0105] In another aspect, TTR dsRNA molecules are expressed from transcription units inserted into DNA or RNA vectors (see, e.g., Couture, A, et al., TIG. (1996), 12:5-10; Skillern, A., et al., International PCT Publication No. WO 00/22113, Conrad, International PCT Publication No. WO 00/22114, and Conrad, U.S. Pat. No. 6,054,299). These transgenes can be introduced as a linear construct, a circular plasmid, or a viral vector, which can be incorporated and inherited as a transgene integrated into the host genome. The transgene can also be constructed to permit it to be inherited as an extrachromosomal plasmid (Gassmann, et al., Proc. Natl. Acad. Sci. USA (1995) 92:1292).

[0106] The individual strands of a dsRNA can be transcribed by promoters on two separate expression vectors and co-transfected into a target cell. Alternatively each individual strand of the dsRNA can be transcribed by promoters both of which are located on the same expression plasmid. In one embodiment, a dsRNA is expressed as an inverted repeat joined by a linker polynucleotide sequence such that the dsRNA has a stem and loop structure.

[0107] The recombinant dsRNA expression vectors are generally DNA plasmids or viral vectors. dsRNA expressing viral vectors can be constructed based on, but not limited to, adeno-associated virus (for a review, see Muzyczka, et al., Curr. Topics Micro. Immunol. (1992) 158:97-129)); adenovirus (see, for example, Berkner, et al., BioTechniques (1998) 6:616), Rosenfeld et al. (1991, Science 252:431-434), and Rosenfeld et al. (1992), Cell 68:143-155)); or alphavirus as well as others known in the art. Retroviruses have been used to introduce a variety of genes into many different cell types, including epithelial cells, in vitro and/or in vivo (see, e.g., Eglitis, et al., Science (1985) 230:1395-1398; Danos and Mulligan, Proc. Natl. Acad. Sci. USA (1998) 85:6460-6464; Wilson et al., 1988, Proc. Natl. Acad. Sci. USA 85:3014-3018; Armentano et al., 1990, Proc. Natl. Acad. Sci. USA 87:61416145; Huber et al., 1991, Proc. Natl. Acad. Sci. USA 88:8039-8043; Ferry et al., 1991, Proc. Natl. Acad. Sci. USA 88:8377-8381; Chowdhury et al., 1991, Science 254:1802-1805; van Beusechem. et al., 1992, Proc. Natl. Acad. Sci. USA 89:7640-19; Kay et al., 1992, Human Gene Therapy 3:641-647; Dai et al., 1992, Proc. Natl. Acad. Sci. USA 89:10892-10895; Hwu et al., 1993, J. Immunol. 150:4104-4115; U.S. Pat. Nos. 4,868,116; 4,980,286; PCT Application WO 89/07136; PCT Application WO 89/02468; PCT Application WO 89/05345; and PCT Application WO 92/07573). Recombinant retroviral vectors capable of transducing and expressing genes inserted into the genome of a cell can be produced by transfecting the recombinant retroviral genome into suitable packaging cell lines such as PA317 and Psi-CRIP (Comette et al., 1991, Human Gene Therapy 2:5-10; Cone et al., 1984, Proc. Natl. Acad. Sci. USA 81:6349). Recombinant adenoviral vectors can be used to infect a wide variety of cells and tissues in susceptible hosts (e.g., rat, hamster, dog, and chimpanzee) (Hsu et al., 1992, J. Infectious Disease, 166:769), and also have the advantage of not requiring mitotically active cells for infection.

[0108] Any viral vector capable of accepting the coding sequences for the dsRNA molecule(s) to be expressed can be used, for example vectors derived from adenovirus (AV); adeno-associated virus (AAV); retroviruses (e.g, lentiviruses (LV), Rhabdoviruses, murine leukemia virus); herpes virus, and the like. The tropism of viral vectors can be modified by pseudotyping the vectors with envelope proteins or other surface antigens from other viruses, or by substituting different viral capsid proteins, as appropriate.

[0109] For example, lentiviral vectors featured in the invention can be pseudotyped with surface proteins from vesicular stomatitis virus (VSV), rabies, Ebola, Mokola, and the like. AAV vectors featured in the invention can be made to target different cells by engineering the vectors to express different capsid protein serotypes. For example, an AAV vector expressing a serotype 2 capsid on a serotype 2 genome is called AAV 2/2. This serotype 2 capsid gene in the AAV 2/2 vector can be replaced by a serotype 5 capsid gene to produce an AAV 2/5 vector. Techniques for constructing AAV vectors which express different capsid protein serotypes are within the skill in the art; see, e.g., Rabinowitz J E et al. (2002), J Virol 76:791-801, the entire disclosure of which is herein incorporated by reference.

[0110] Selection of recombinant viral vectors suitable for use in the invention, methods for inserting nucleic acid sequences for expressing the dsRNA into the vector, and methods of delivering the viral vector to the cells of interest are within the skill in the art. See, for example, Dornburg R (1995), Gene Therap. 2:301-310; Eglitis M A (1988), Biotechniques 6:608-614; Miller A D (1990), Hum Gene Therap. 1:5-14; Anderson W F (1998), Nature 392:25-30; and Rubinson D A et al., Nat. Genet. 33:401-406, the entire disclosures of which are herein incorporated by reference.

[0111] Viral vectors can be derived from AV and AAV. In one embodiment, the dsRNA featured in the invention is expressed as two separate, complementary single-stranded RNA molecules from a recombinant AAV vector having, for example, either the U6 or H1 RNA promoters, or the cytomegalovirus (CMV) promoter.

[0112] A suitable AV vector for expressing the dsRNA featured in the invention, a method for constructing the recombinant AV vector, and a method for delivering the vector into target cells, are described in Xia H et al. (2002), Nat. Biotech. 20:1006-1010.

[0113] Suitable AAV vectors for expressing the dsRNA featured in the invention, methods for constructing the recombinant AV vector, and methods for delivering the vectors into target cells are described in Samulski R et al. (1987), J. Virol. 61:3096-3101; Fisher K J et al. (1996), J. Virol, 70:520-532; Samulski R et al. (1989), J. Virol. 63:3822-3826; U.S. Pat. Nos. 5,252,479; 5,139,941; International Patent Application No. WO 94/13788; and International Patent Application No. WO 93/24641, the entire disclosures of which are herein incorporated by reference.

[0114] The promoter driving dsRNA expression in either a DNA plasmid or viral vector featured in the invention may be a eukaryotic RNA polymerase I (e.g., ribosomal RNA promoter), RNA polymerase II (e.g., CMV early promoter or actin promoter or U1 snRNA promoter) or generally RNA polymerase III promoter (e.g., U6 snRNA or 7SK RNA promoter) or a prokaryotic promoter, for example the T7 promoter, provided the expression plasmid also encodes T7 RNA polymerase required for transcription from a T7 promoter. The promoter can also direct transgene expression to the pancreas (see, e.g., the insulin regulatory sequence for pancreas (Bucchini et al., 1986, Proc. Natl. Acad. Sci. USA 83:2511-2515)).

[0115] In addition, expression of the transgene can be precisely regulated, for example, by using an inducible regulatory sequence and expression systems such as a regulatory sequence that is sensitive to certain physiological regulators, e.g., circulating glucose levels, or hormones (Docherty et al., 1994, FASEB J. 8:20-24). Such inducible expression systems, suitable for the control of transgene expression in cells or in mammals include regulation by ecdysone, by estrogen, progesterone, tetracycline, chemical inducers of dimerization, and isopropyl-beta-D1-thiogalactopyranoside (EPTG). A person skilled in the art would be able to choose the appropriate regulatory/promoter sequence based on the intended use of the dsRNA transgene.

[0116] Generally, recombinant vectors capable of expressing dsRNA molecules are delivered as described below, and persist in target cells. Alternatively, viral vectors can be used that provide for transient expression of dsRNA molecules. Such vectors can be repeatedly administered as necessary. Once expressed, the dsRNAs bind to target RNA and modulate its function or expression. Delivery of dsRNA expressing vectors can be systemic, such as by intravenous or intramuscular administration, by administration to target cells ex-planted from the patient followed by reintroduction into the patient, or by any other means that allows for introduction into a desired target cell.

[0117] dsRNA expression DNA plasmids are typically transfected into target cells as a complex with cationic lipid carriers (e.g., Oligofectamine) or non-cationic lipid-based carriers (e.g., Transit-TKO™). Multiple lipid transfections for dsRNA-mediated knockdowns targeting different regions of a single TTR gene or multiple TTR genes over a period of a week or more are also contemplated by the invention. Successful introduction of vectors into host cells can be monitored using various known methods. For example, transient transfection can be signaled with a reporter, such as a fluorescent marker, such as Green Fluorescent Protein (GFP). Stable transfection of cells ex vivo can be ensured using markers that provide the transfected cell with resistance to specific environmental factors (e.g., antibiotics and drugs), such as hygromycin B resistance.

[0118] TTR specific dsRNA molecules can also be inserted into vectors and used as gene therapy vectors for human patients. Gene therapy vectors can be delivered to a subject by, for example, intravenous injection, local administration (see U.S. Pat. No. 5,328,470) or by stereotactic injection (see e.g., Chen et al. (1994) Proc. Natl. Acad. Sci. USA 91:3054-3057). The pharmaceutical preparation of the gene therapy vector can include the gene therapy vector in an acceptable diluent, or can include a slow release matrix in which the gene delivery vehicle is imbedded. Alternatively, where the complete gene delivery vector can be produced intact from recombinant cells, e.g., retroviral vectors, the pharmaceutical preparation can include one or more cells which produce the gene delivery system.

### III. Pharmaceutical Compositions Containing dsRNA

[0119] In one embodiment, the invention provides pharmaceutical compositions containing a dsRNA, as described herein, and a pharmaceutically acceptable carrier. The pharmaceutical composition containing the dsRNA is useful for treating a disease or disorder associated with the expression or activity of a TTR gene, such as pathological processes mediated by TTR expression. Such pharmaceutical compositions are formulated based on the mode of delivery. One example is compositions that are formulated for systemic administration via parenteral delivery, e.g., by intravenous (IV) delivery. Another example is compositions that are formulated for direct delivery into the brain parenchyma, e.g., by infusion into the brain, such as by continuous pump infusion.

[0120] The pharmaceutical compositions featured herein are administered in dosages sufficient to inhibit expression of TTR genes.

[0121] In general, a suitable dose of dsRNA will be in the range of 0.01 to 200.0 milligrams per kilogram body weight of the recipient per day, generally in the range of 1 to 50 mg per kilogram body weight per day. For example, the dsRNA can be administered at 0.0059 mg/kg, 0.01 mg/kg, 0.0295 mg/kg, 0.05 mg/kg, 0.0590 mg/kg, 0.163 mg/kg, 0.2 mg/kg, 0.3 mg/kg, 0.4 mg/kg, 0.5 mg/kg, 0.543 mg/kg, 0.5900 mg/kg, 0.6 mg/kg, 0.7 mg/kg, 0.8 mg/kg, 0.9 mg/kg, 1 mg/kg, 1.1 mg/kg, 1.2 mg/kg, 1.3 mg/kg, 1.4 mg/kg, 1.5 mg/kg, 1.628 mg/kg, 2 mg/kg, 3 mg/kg, 5.0 mg/kg, 10 mg/kg, 20 mg/kg, 30 mg/kg, 40 mg/kg, or 50 mg/kg per single dose.

[0122] In one embodiment, the dosage is between 0.01 and 0.2 mg/kg. For example, the dsRNA can be administered at a dose of 0.01 mg/kg, 0.02 mg/kg, 0.3 mg/kg, 0.04 mg/kg, 0.05 mg/kg, 0.06 mg/kg, 0.07 mg/kg 0.08 mg/kg 0.09 mg/kg, 0.10 mg/kg, 0.11 mg/kg, 0.12 mg/kg, 0.13 mg/kg, 0.14 mg/kg, 0.15 mg/kg, 0.16 mg/kg, 0.17 mg/kg, 0.18 mg/kg, 0.19 mg/kg, or 0.20 mg/kg.

[0123] In one embodiment, the dosage is between 0.005 mg/kg and 1.628 mg/kg. For example, the dsRNA can be administered at a dose of 0.0059 mg/kg, 0.0295 mg/kg, 0.0590 mg/kg, 0.163 mg/kg, 0.543 mg/kg, 0.5900 mg/kg, or 1.628 mg/kg.

[0124] In one embodiment, the dosage is between 0.2 mg/kg and 1.5 mg/kg. For example, the dsRNA can be administered at a dose of 0.2 mg/kg, 0.3 mg/kg, 0.4 mg/kg, 0.5 mg/kg, 0.6 mg/kg, 0.7 mg/kg, 0.8 mg/kg, 0.9 mg/kg, 1 mg/kg, 1.1 mg/kg, 1.2 mg/kg, 1.3 mg/kg, 1.4 mg/kg, or 1.5 mg/kg.

[0125] The pharmaceutical composition may be administered once daily, or the dsRNA may be administered as two, three, or more sub-doses at appropriate intervals throughout the day or even using continuous infusion or delivery through a controlled release formulation. In that case, the dsRNA contained in each sub-dose must be correspondingly smaller in order to achieve the total daily dosage. The dosage unit can also be compounded for delivery over several days, e.g., using a conventional sustained release formulation which provides sustained release of the dsRNA over a several day period. Sustained release formulations are well known in the art and are particularly useful for delivery of agents at a particular site, such as could be used with the agents of the present invention. In this embodiment, the dosage unit contains a corresponding multiple of the daily dose.

[0126] The effect of a single dose on TTR levels is long lasting, such that subsequent doses are administered at not more than 3, 4, or 5 day intervals, or at not more than 1, 2, 3, or 4 week intervals, or at not more than 5, 6, 7, 8, 9, or 10 week intervals.

[0127] The skilled artisan will appreciate that certain factors may influence the dosage and timing required to effectively treat a subject, including but not limited to the severity of the disease or disorder, previous treatments, the general health and/or age of the subject, and other diseases present. Moreover, treatment of a subject with a therapeutically effective amount of a composition can include a single treatment or a series of treatments. Estimates of effective dosages and in vivo half-lives for the individual dsRNAs encompassed by the invention can be made using conventional methodologies or on the basis of in vivo testing using an appropriate animal model, as described elsewhere herein.

[0128] Advances in mouse genetics have generated a number of mouse models for the study of various human diseases, such as pathological processes mediated by TTR expression. Such models are used for in vivo testing of dsRNA, as well as for determining a therapeutically effective dose. A suitable mouse model is, for example, a mouse containing a plasmid expressing human TTR. Another suitable mouse model is a transgenic mouse carrying a transgene that expresses human TTR.

[0129] The data obtained from cell culture assays and animal studies can be used in formulating a range of dosage for use in humans. The dosage of compositions featured in the invention lies generally within a range of circulating concentrations that include the ED50 with little or no toxicity. The dosage may vary within this range depending upon the dosage form employed and the route of administration utilized. For any compound used in the methods featured in the invention, the therapeutically effective dose can be estimated initially from cell culture assays. A dose may be formulated in animal models to achieve a circulating plasma concentration range of the compound or, when appropriate, of the polypeptide product of a target sequence (e.g., achieving a decreased concentration of the polypeptide) that includes the IC50 (i.e., the concentration of the test compound which achieves a half-maximal inhibition of symptoms) as determined in cell culture. Such information can be used to more accurately determine useful doses in humans. Levels in plasma may be measured, for example, by high performance liquid chromatography.

[0130] The dsRNAs featured in the invention can be administered in combination with other known agents effective in treatment of pathological processes mediated by target gene expression. In any event, the administering physician can adjust the amount and timing of dsRNA administration on the basis of results observed using standard measures of efficacy known in the art or described herein.

### Administration

[0131] The present invention also includes pharmaceutical compositions and formulations which include the dsRNA compounds featured in the invention. The pharmaceutical compositions of the present invention may be administered in a number of ways depending upon whether local or systemic treatment is desired and upon the area to be treated. Administration may be topical, pulmonary, e.g., by inhalation or insufflation of powders or aerosols, including by nebulizer; intratracheal, intranasal, epidermal and transdermal, oral or parenteral. Parenteral administration includes intravenous, intraarterial, subcutaneous, intraperitoneal or intramuscular injection or infusion; or intracranial, e.g., intraparenchymal, intrathecal or intraventricular, administration.

[0132] The dsRNA can be delivered in a manner to target a particular tissue, such as the liver (e.g., the hepatocytes of the liver).

[0133] The present invention includes pharmaceutical compositions that can be delivered by injection directly into the brain. The injection can be by stereotactic injection into a particular region of the brain (e.g., the substantia nigra, cortex, hippocampus, striatum, or globus pallidus), or the dsRNA can be delivered into multiple regions of the central nervous system (e.g., into multiple regions of the brain, and/or into the spinal cord). The dsRNA can also be delivered into diffuse regions of the brain (e.g., diffuse delivery to the cortex of the brain).

[0134] In one embodiment, a dsRNA targeting TTR can be delivered by way of a cannula or other delivery device having one end implanted in a tissue, e.g., the brain, e.g., the substantia nigra, cortex, hippocampus, striatum, corpus callosum or globus pallidus of the brain. The cannula can be connected to a reservoir of the dsRNA composition. The flow or delivery can be mediated by a pump, e.g., an osmotic pump or minipump, such as an Alzet pump (Durect, Cupertino, CA). In one embodiment, a pump and reservoir are implanted in an area distant from the tissue, e.g., in the abdomen, and delivery is effected by a conduit leading from the pump or reservoir to the site of release. Infusion of the dsRNA composition into the brain can be over several hours or for several days, e.g., for 1, 2, 3, 5, or 7 days or more. Devices for delivery to the brain are described, for example, in U.S. Pat. Nos. 6,093,180, and 5,814,014.

[0135] Pharmaceutical compositions and formulations for topical administration may include transdermal patches, ointments, lotions, creams, gels, drops, suppositories, sprays, liquids and powders. Conventional pharmaceutical carriers, aqueous, powder or oily bases, thickeners and the like may be necessary or desirable. Coated condoms, gloves and the like may also be useful. Suitable topical formulations include those in which the dsRNAs featured in the invention are in admixture with a topical delivery agent such as lipids, liposomes, fatty acids, fatty acid esters, steroids, chelating agents and surfactants. Suitable lipids and liposomes include neutral (e.g., dioleoylphosphatidyl DOPE ethanolamine, dimyristoylphosphatidyl choline DMPC, distearoylphosphatidyl choline) negative (e.g., dimyristoylphosphatidyl glycerol DMPG) and cationic (e.g., dioleoyltetramethylaminopropyl DOTAP and dioleoylphosphatidyl ethanolamine DOTMA). DsRNAs featured in the invention may be encapsulated within liposomes or may form complexes thereto, in particular to cationic liposomes. Alternatively, dsRNAs may be complexed to lipids, in particular to cationic lipids. Suitable fatty acids and esters include but are not limited to arachidonic acid, oleic acid, eicosanoic acid, lauric acid, caprylic acid, capric acid, myristic acid, palmitic acid, stearic acid, linoleic acid, linolenic acid, dicaprate, tricaprate, monoolein, dilaurin, glyceryl 1-monocaprate, 1-dodecylazacycloheptan-2-one, an acylcarnitine, an acylcholine, or a C1-10 alkyl ester (e.g., isopropylmyristate IPM), monoglyceride, diglyceride or pharmaceutically acceptable salt thereof. Topical formulations are described in detail in U.S. Pat. No. 6,747,014, which is incorporated herein by reference.

### Liposomal Formulations

[0136] There are many organized surfactant structures besides microemulsions that have been studied and used for the formulation of drugs. These include monolayers, micelles, bilayers and vesicles. Vesicles, such as liposomes, have attracted great interest because of their specificity and the duration of action they offer from the standpoint of drug delivery. As used in the present invention, the term “liposome” means a vesicle composed of amphiphilic lipids arranged in a spherical bilayer or bilayers.

[0137] Liposomes are unilamellar or multilamellar vesicles which have a membrane formed from a lipophilic material and an aqueous interior. The aqueous portion contains the composition to be delivered. Cationic liposomes possess the advantage of being able to fuse to the cell wall. Non-cationic liposomes, although not able to fuse as efficiently with the cell wall, are taken up by macrophages in vivo.

[0138] In order to cross intact mammalian skin, lipid vesicles must pass through a series of fine pores, each with a diameter less than 50 nm, under the influence of a suitable transdermal gradient. Therefore, it is desirable to use a liposome which is highly deformable and able to pass through such fine pores.

[0139] Further advantages of liposomes include; liposomes obtained from natural phospholipids are biocompatible and biodegradable; liposomes can incorporate a wide range of water and lipid soluble drugs; liposomes can protect encapsulated drugs in their internal compartments from metabolism and degradation (Rosoff, in Pharmaceutical Dosage Forms, Lieberman, Rieger and Banker (Eds.), 1988, Marcel Dekker, Inc., New York, N.Y., volume 1, p. 245). Important considerations in the preparation of liposome formulations are the lipid surface charge, vesicle size and the aqueous volume of the liposomes.

[0140] Liposomes are useful for the transfer and delivery of active ingredients to the site of action. Because the liposomal membrane is structurally similar to biological membranes, when liposomes are applied to a tissue, the liposomes start to merge with the cellular membranes and as the merging of the liposome and cell progresses, the liposomal contents are emptied into the cell where the active agent may act.

[0141] Liposomal formulations have been the focus of extensive investigation as the mode of delivery for many drugs. There is growing evidence that for topical administration, liposomes present several advantages over other formulations. Such advantages include reduced side-effects related to high systemic absorption of the administered drug, increased accumulation of the administered drug at the desired target, and the ability to administer a wide variety of drugs, both hydrophilic and hydrophobic, into the skin.

[0142] Several reports have detailed the ability of liposomes to deliver agents including high-molecular weight DNA into the skin. Compounds including analgesics, antibodies, hormones and high-molecular weight DNAs have been administered to the skin. The majority of applications resulted in the targeting of the upper epidermis

[0143] Liposomes fall into two broad classes. Cationic liposomes are positively charged liposomes which interact with the negatively charged DNA molecules to form a stable complex. The positively charged DNA/liposome complex binds to the negatively charged cell surface and is internalized in an endosome. Due to the acidic pH within the endosome, the liposomes are ruptured, releasing their contents into the cell cytoplasm (Wang et al., Biochem. Biophys. Res. Commun., 1987, 147, 980-985).

[0144] Liposomes which are pH-sensitive or negatively-charged, entrap DNA rather than complex with it. Since both the DNA and the lipid are similarly charged, repulsion rather than complex formation occurs. Nevertheless, some DNA is entrapped within the aqueous interior of these liposomes. pH-sensitive liposomes have been used to deliver DNA encoding the thymidine kinase gene to cell monolayers in culture. Expression of the exogenous gene was detected in the target cells (Zhou et al., Journal of Controlled Release, 1992, 19, 269-274).

[0145] One major type of liposomal composition includes phospholipids other than naturally-derived phosphatidylcholine. Neutral liposome compositions, for example, can be formed from dimyristoyl phosphatidylcholine (DMPC) or dipalmitoyl phosphatidylcholine (DPPC). Anionic liposome compositions generally are formed from dimyristoyl phosphatidylglycerol, while anionic fusogenic liposomes are formed primarily from dioleoyl phosphatidylethanolamine (DOPE). Another type of liposomal composition is formed from phosphatidylcholine (PC) such as, for example, soybean PC, and egg PC. Another type is formed from mixtures of phospholipid and/or phosphatidylcholine and/or cholesterol.

[0146] Several studies have assessed the topical delivery of liposomal drug formulations to the skin. Application of liposomes containing interferon to guinea pig skin resulted in a reduction of skin herpes sores while delivery of interferon via other means (e.g., as a solution or as an emulsion) were ineffective (Weiner et al., Journal of Drug Targeting, 1992, 2, 405-410). Further, an additional study tested the efficacy of interferon administered as part of a liposomal formulation to the administration of interferon using an aqueous system, and concluded that the liposomal formulation was superior to aqueous administration (du Plessis et al., Antiviral Research, 1992, 18, 259-265).

[0147] Non-ionic liposomal systems have also been examined to determine their utility in the delivery of drugs to the skin, in particular systems comprising non-ionic surfactant and cholesterol. Non-ionic liposomal formulations comprising Novasome™ I (glyceryl dilaurate/cholesterol/polyoxyethylene-10-stearyl ether) and Novasome™ II (glyceryl distearate/cholesterol/polyoxyethylene-10-stearyl ether) were used to deliver cyclosporin-A into the dermis of mouse skin. Results indicated that such non-ionic liposomal systems were effective in facilitating the deposition of cyclosporin-A into different layers of the skin (Hu et al. S.T.P. Pharma. Sci., 1994, 4, 6, 466).

[0148] Liposomes also include “sterically stabilized” liposomes, a term which, as used herein, refers to liposomes comprising one or more specialized lipids that, when incorporated into liposomes, result in enhanced circulation lifetimes relative to liposomes lacking such specialized lipids. Examples of sterically stabilized liposomes are those in which part of the vesicle-forming lipid portion of the liposome (A) comprises one or more glycolipids, such as monosialoganglioside G_{M1}, or (B) is derivatized with one or more hydrophilic polymers, such as a polyethylene glycol (PEG) moiety. While not wishing to be bound by any particular theory, it is thought in the art that, at least for sterically stabilized liposomes containing gangliosides, sphingomyelin, or PEG-derivatized lipids, the enhanced circulation half-life of these sterically stabilized liposomes derives from a reduced uptake into cells of the reticuloendothelial system (RES) (Allen et al., FEBS Letters, 1987, 223, 42; Wu et al., Cancer Research, 1993, 53, 3765).

[0149] Various liposomes comprising one or more glycolipids are known in the art. Papahadjopoulos et al. (Ann. N.Y. Acad. Sci., 1987, 507, 64) reported the ability of monosialoganglioside G_{M1}, galactocerebroside sulfate and phosphatidylinositol to improve blood half-lives of liposomes. These findings were expounded upon by Gabizon et al. (Proc. Natl. Acad. Sci. U.S.A., 1988, 85, 6949). U.S. Pat. No. 4,837,028 and WO 88/04924, both to Allen et al., disclose liposomes comprising (1) sphingomyelin and (2) the ganglioside G_{M1} or a galactocerebroside sulfate ester. U.S. Pat. No. 5,543,152 (Webb et al.) discloses liposomes comprising sphingomyelin. Liposomes comprising 1,2-sn-dimyristoylphosphatidylcholine are disclosed in WO 97/13499 (Lim et al).

[0150] Many liposomes comprising lipids derivatized with one or more hydrophilic polymers, and methods of preparation thereof, are known in the art. Sunamoto et al. (Bull. Chem. Soc. Jpn., 1980, 53, 2778) described liposomes comprising a nonionic detergent, 2C1215G, that contains a PEG moiety. Illum et al. (FEBS Lett., 1984, 167, 79) noted that hydrophilic coating of polystyrene particles with polymeric glycols results in significantly enhanced blood half-lives. Synthetic phospholipids modified by the attachment of carboxylic groups of polyalkylene glycols (e.g., PEG) are described by Sears (U.S. Pat. Nos. 4,426,330 and 4,534,899). Klibanov et al. (FEBS Lett., 1990, 268, 235) described experiments demonstrating that liposomes comprising phosphatidylethanolamine (PE) derivatized with PEG or PEG stearate have significant increases in blood circulation half-lives. Blume et al. (Biochimica et Biophysica Acta, 1990, 1029, 91) extended such observations to other PEG-derivatized phospholipids, e.g., DSPE-PEG, formed from the combination of distearoylphosphatidylethanolamine (DSPE) and PEG. Liposomes having covalently bound PEG moieties on their external surface are described in European Patent No. EP 0 445 131 B1 and WO 90/04384 to Fisher. Liposome compositions containing 1-20 mole percent of PE derivatized with PEG, and methods of use thereof, are described by Woodle et al. (U.S. Pat. Nos. 5,013,556 and 5,356,633) and Martin et al. (U.S. Pat. No. 5,213,804 and European Patent No. EP 0 496 813 B1). Liposomes comprising a number of other lipid-polymer conjugates are disclosed in WO 91/05545 and U.S. Pat. No. 5,225,212 (both to Martin et al.) and in WO 94/20073 (Zalipsky et al.) Liposomes comprising PEG-modified ceramide lipids are described in WO 96/10391 (Choi et al). U.S. Pat. No. 5,540,935 (Miyazaki et al.) and U.S. Pat. No. 5,556,948 (Tagawa et al.) describe PEG-containing liposomes that can be further derivatized with functional moieties on their surfaces.

[0151] A number of liposomes comprising nucleic acids are known in the art. WO 96/40062 to Thierry et al. discloses methods for encapsulating high molecular weight nucleic acids in liposomes. U.S. Pat. No. 5,264,221 to Tagawa et al. discloses protein-bonded liposomes and asserts that the contents of such liposomes may include a dsRNA. U.S. Pat. No. 5,665,710 to Rahman et al. describes certain methods of encapsulating oligodeoxynucleotides in liposomes. WO 97/04787 to Love et al. discloses liposomes comprising dsRNAs targeted to the raf gene.

[0152] Transfersomes are yet another type of liposomes, and are highly deformable lipid aggregates which are attractive candidates for drug delivery vehicles. Transfersomes may be described as lipid droplets which are so highly deformable that they are easily able to penetrate through pores which are smaller than the droplet. Transfersomes are adaptable to the environment in which they are used, e.g., they are self-optimizing (adaptive to the shape of pores in the skin), self-repairing, frequently reach their targets without fragmenting, and often self-loading. To make transfersomes it is possible to add surface edge-activators, usually surfactants, to a standard liposomal composition. Transfersomes have been used to deliver serum albumin to the skin. The transfersome-mediated delivery of serum albumin has been shown to be as effective as subcutaneous injection of a solution containing serum albumin.

[0153] Surfactants find wide application in formulations such as emulsions (including microemulsions) and liposomes. The most common way of classifying and ranking the properties of the many different types of surfactants, both natural and synthetic, is by the use of the hydrophile/lipophile balance (HLB). The nature of the hydrophilic group (also known as the “head”) provides the most useful means for categorizing the different surfactants used in formulations (Rieger, in Pharmaceutical Dosage Forms, Marcel Dekker, Inc., New York, N.Y., 1988, p. 285).

[0154] If the surfactant molecule is not ionized, it is classified as a nonionic surfactant. Nonionic surfactants find wide application in pharmaceutical and cosmetic products and are usable over a wide range of pH values. In general their HLB values range from 2 to about 18 depending on their structure. Nonionic surfactants include nonionic esters such as ethylene glycol esters, propylene glycol esters, glyceryl esters, polyglyceryl esters, sorbitan esters, sucrose esters, and ethoxylated esters. Nonionic alkanolamides and ethers such as fatty alcohol ethoxylates, propoxylated alcohols, and ethoxylated/propoxylated block polymers are also included in this class. The polyoxyethylene surfactants are the most popular members of the nonionic surfactant class.

[0155] If the surfactant molecule carries a negative charge when it is dissolved or dispersed in water, the surfactant is classified as anionic. Anionic surfactants include carboxylates such as soaps, acyl lactylates, acyl amides of amino acids, esters of sulfuric acid such as alkyl sulfates and ethoxylated alkyl sulfates, sulfonates such as alkyl benzene sulfonates, acyl isethionates, acyl taurates and sulfosuccinates, and phosphates. The most important members of the anionic surfactant class are the alkyl sulfates and the soaps.

[0156] If the surfactant molecule carries a positive charge when it is dissolved or dispersed in water, the surfactant is classified as cationic. Cationic surfactants include quaternary ammonium salts and ethoxylated amines. The quaternary ammonium salts are the most used members of this class.

[0157] If the surfactant molecule has the ability to carry either a positive or negative charge, the surfactant is classified as amphoteric. Amphoteric surfactants include acrylic acid derivatives, substituted alkylamides, N-alkylbetaines and phosphatides.

[0158] The use of surfactants in drug products, formulations and in emulsions has been reviewed (Rieger, in Pharmaceutical Dosage Forms, Marcel Dekker, Inc., New York, N.Y., 1988, p. 285).

### Nucleic Acid Lipid Particles

[0159] In one embodiment, a TTR dsRNA featured in the invention is fully encapsulated in the lipid formulation, e.g., to form a SPLP, pSPLP, SNALP, or other nucleic acid-lipid particle. As used herein, the term “SNALP” refers to a stable nucleic acid-lipid particle, including SPLP. As used herein, the term “SPLP” refers to a nucleic acid-lipid particle comprising plasmid DNA encapsulated within a lipid vesicle. SNALPs and SPLPs typically contain a cationic lipid, a non-cationic lipid, and a lipid that prevents aggregation of the particle (e.g., a PEG-lipid conjugate). SNALPs and SPLPs are extremely useful for systemic applications, as they exhibit extended circulation lifetimes following intravenous (i.v.) injection and accumulate at distal sites (e.g., sites physically separated from the administration site). SPLPs include “pSPLP,” which include an encapsulated condensing agent-nucleic acid complex as set forth in PCT Publication No. WO 00/03683. The particles of the present invention typically have a mean diameter of about 50 nm to about 150 nm, more typically about 60 nm to about 130 nm, more typically about 70 nm to about 110 nm, most typically about 70 nm to about 90 nm, and are substantially nontoxic. In addition, the nucleic acids when present in the nucleic acid-lipid particles of the present invention are resistant in aqueous solution to degradation with a nuclease. Nucleic acid-lipid particles and their method of preparation are disclosed in, e.g., U.S. Pat. Nos. 5,976,567; 5,981,501; 6,534,484; 6,586,410; 6,815,432; and PCT Publication No. WO 96/40964.

[0160] In one embodiment, the lipid to drug ratio (mass/mass ratio) (e.g., lipid to dsRNA ratio) will be in the range of from about 1:1 to about 50:1, from about 1:1 to about 25:1, from about 3:1 to about 15:1, from about 4:1 to about 10:1, from about 5:1 to about 9:1, or about 6:1 to about 9:1.

[0161] The cationic lipid may be, for example, N,N-dioleyl-N,N-dimethylammonium chloride (DODAC), N,N-distearyl-N,N-dimethylammonium bromide (DDAB), N-(I-(2,3-dioleoyloxy) propyl)-N,N,N-trimethylammonium chloride (DOTAP), N-(I-(2,3-dioleyloxy) propyl)-N,N,N-trimethylammonium chloride (DOTMA), N,N-dimethyl-2,3-dioleyloxy) propylamine (DODMA), 1,2-DiLinoleyloxy-N,N-dimethylaminopropane (DLinDMA), 1,2-Dilinolenyloxy-N,N-dimethylaminopropane (DLenDMA), 1,2-Dilinoleylcarbamoyloxy-3-dimethylaminopropane (DLin-C-DAP), 1,2-Dilinoleyoxy-3-(dimethylamino) acetoxypropane (DLin-DAC), 1,2-Dilinoleyoxy-3-morpholinopropane (DLin-MA), 1,2-Dilinoleoyl-3-dimethylaminopropane (DLinDAP), 1,2-Dilinoleylthio-3-dimethylaminopropane (DLin-S-DMA), 1-Linoleoyl-2-linoleyloxy-3-dimethylaminopropane (DLin-2-DMAP), 1,2-Dilinoleyloxy-3-trimethylaminopropane chloride salt (DLin-TMA·Cl), 1,2-Dilinoleoyl-3-trimethylaminopropane chloride salt (DLin-TAP·Cl), 1,2-Dilinoleyloxy-3-(N-methylpiperazino) propane (DLin-MPZ), or 3-(N,N-Dilinoleylamino)-1,2-propanediol (DLinAP), 3-(N,N-Dioleylamino)-1,2-propanedio (DOAP), 1,2-Dilinoleyloxo-3-(2-N,N-dimethylamino) ethoxypropane (DLin-EG-DMA), 1,2-Dilinolenyloxy-N,N-dimethylaminopropane (DLinDMA), 2,2-Dilinoleyl-4-dimethylaminomethyl-[1,3]-dioxolane (DLin-K-DMA) or analogs thereof, (3aR,5s,6aS)-N,N-dimethyl-2,2-di((9Z,12Z)-octadeca-9,12-dienyl)tetrahydro-3aH-cyclopenta[d][1,3]dioxol-5-amine (ALN100), (6Z,9Z,28Z,31Z)-heptatriaconta-6,9,28,31-tetraen-19-yl 4-(dimethylamino) butanoate (MC3), 1,1′-(2-(4-(2-((2-(bis(2-hydroxydodecyl)amino)ethyl) (2-hydroxydodecyl)amino)ethyl) piperazin-1-yl)ethylazanediyl)didodecan-2-ol (Tech G1), or a mixture thereof. The cationic lipid may comprise from about 20 mol % to about 50 mol % or about 40 mol % of the total lipid present in the particle.

[0162] In another embodiment, the compound 2,2-Dilinoleyl-4-dimethylaminoethyl-[1,3]-dioxolane can be used to prepare lipid-siRNA nanoparticles. Synthesis of 2,2-Dilinoleyl-4-dimethylaminoethyl-[1,3]-dioxolane is described in U.S. provisional patent application No. 61/107,998 filed on Oct. 23, 2008, which is herein incorporated by reference.

[0163] In one embodiment, the lipid-siRNA particle includes 40% 2, 2-Dilinoleyl-4-dimethylaminoethyl-[1,3]-dioxolane: 10% DSPC: 40% Cholesterol: 10% PEG-C-DOMG (mole percent) with a particle size of 63.0±20 nm and a 0.027 siRNA/Lipid Ratio.

[0164] The non-cationic lipid may be an anionic lipid or a neutral lipid including, but not limited to, distearoylphosphatidylcholine (DSPC), dioleoylphosphatidylcholine (DOPC), dipalmitoylphosphatidylcholine (DPPC), dioleoylphosphatidylglycerol (DOPG), dipalmitoylphosphatidylglycerol (DPPG), dioleoyl-phosphatidylethanolamine (DOPE), palmitoyloleoylphosphatidylcholine (POPC), palmitoyloleoylphosphatidylethanolamine (POPE), dioleoyl-phosphatidylethanolamine 4-(N-maleimidomethyl)-cyclohexane-1-carboxylate (DOPE-mal), dipalmitoyl phosphatidyl ethanolamine (DPPE), dimyristoylphosphoethanolamine (DMPE), distearoyl-phosphatidyl-ethanolamine (DSPE), 16-O-monomethyl PE, 16-O-dimethyl PE, 18-1-trans PE, 1-stearoyl-2-oleoyl-phosphatidyethanolamine (SOPE), cholesterol, or a mixture thereof. The non-cationic lipid may be from about 5 mol % to about 90 mol %, about 10 mol %, or about 58 mol % if cholesterol is included, of the total lipid present in the particle.

[0165] The conjugated lipid that inhibits aggregation of particles may be, for example, a polyethyleneglycol (PEG)-lipid including, without limitation, a PEG-diacylglycerol (DAG), a PEG-dialkyloxypropyl (DAA), a PEG-phospholipid, a PEG-ceramide (Cer), or a mixture thereof. The PEG-DAA conjugate may be, for example, a PEG-dilauryloxypropyl (Ci₂), a PEG-dimyristyloxypropyl (Ci₄), a PEG-dipalmityloxypropyl (Ci₆), or a PEG-distearyloxypropyl (C]₈). The conjugated lipid that prevents aggregation of particles may be from 0 mol % to about 20 mol % or about 2 mol % of the total lipid present in the particle.

[0166] In some embodiments, the nucleic acid-lipid particle further includes cholesterol at, e.g., about 10 mol % to about 60 mol % or about 48 mol % of the total lipid present in the particle.

### LNP01

[0167] In one embodiment, the lipidoid ND98·4HCl (MW 1487) (Formula 1), Cholesterol (Sigma-Aldrich), and PEG-Ceramide C16 (Avanti Polar Lipids) can be used to prepare lipid-siRNA nanoparticles (i.e., LNP01 particles). Stock solutions of each in ethanol can be prepared as follows: ND98, 133 mg/ml; Cholesterol, 25 mg/ml, PEG-Ceramide C16, 100 mg/ml. The ND98, Cholesterol, and PEG-Ceramide C16 stock solutions can then be combined in a, e.g., 42:48:10 molar ratio. The combined lipid solution can be mixed with aqueous siRNA (e.g., in sodium acetate pH 5) such that the final ethanol concentration is about 35-45% and the final sodium acetate concentration is about 100-300 mM. Lipid-siRNA nanoparticles typically form spontaneously upon mixing. Depending on the desired particle size distribution, the resultant nanoparticle mixture can be extruded through a polycarbonate membrane (e.g., 100 nm cut-off) using, for example, a thermobarrel extruder, such as Lipex Extruder (Northern Lipids, Inc). In some cases, the extrusion step can be omitted. Ethanol removal and simultaneous buffer exchange can be accomplished by, for example, dialysis or tangential flow filtration. Buffer can be exchanged with, for example, phosphate buffered saline (PBS) at about pH 7, e.g., about pH 6.9, about pH 7.0, about pH 7.1, about pH 7.2, about pH 7.3, or about pH 7.4.

[chemical structure]

[0168] LNP01 formulations are described, e.g., in International Application Publication No. WO 2008/042973, which is hereby incorporated by reference.

[0169] Additional exemplary lipid-siRNA formulations are as follows:

| | | cationic lipid/non-cationic | |
|---|---|---|---|
| | | lipid/cholesterol/PEG-lipid conjugate | |
| | Cationic Lipid | Lipid:siRNA ratio | Process |
| SNALP | 1,2-Dilinolenyloxy-N,N- | DLinDMA/DPPC/Cholesterol/PEG-cDMA | |
| | dimethylaminopropane (DLinDMA) | (57.1/7.1/34.4/1.4) | |
| | | lipid:siRNA~7:1 | |
| SNALP- | 2,2-Dilinoleyl-4-dimethylaminoethyl- | XTC/DPPC/Cholesterol/PEG-cDMA | |
| XTC | [1,3]-dioxolane (XTC) | 57.1/7.1/34.4/1.4 | |
| | | lipid:siRNA~7:1 | |
| LNP05 | 2,2-Dilinoleyl-4-dimethylaminoethyl- | XTC/DSPC/Cholesterol/PEG-DMG | Extrusion |
| | [1,3]-dioxolane (XTC) | 57.5/7.5/31.5/3.5 | |
| | | lipid:siRNA~6:1 | |
| LNP06 | 2,2-Dilinoleyl-4-dimethylaminoethyl- | XTC/DSPC/Cholesterol/PEG-DMG | Extrusion |
| | [1,3]-dioxolane (XTC) | 57.5/7.5/31.5/3.5 | |
| | | lipid:siRNA~11:1 | |
| LNP07 | 2,2-Dilinoleyl-4-dimethylaminoethyl- | XTC/DSPC/Cholesterol/PEG-DMG | In-line |
| | [1,3]-dioxolane (XTC) | 60/7.5/31/1.5, | mixing |
| | | lipid:siRNA~6:1 | |
| LNP08 | 2,2-Dilinoleyl-4-dimethylaminoethyl- | XTC/DSPC/Cholesterol/PEG-DMG | In-line |
| | [1,3]-dioxolane (XTC) | 60/7.5/31/1.5, | mixing |
| | | lipid:siRNA~11:1 | |
| LNP09 | 2,2-Dilinoleyl-4-dimethylaminoethyl- | XTC/DSPC/Cholesterol/PEG-DMG | In-line |
| | [1,3]-dioxolane (XTC) | 50/10/38.5/1.5 | mixing |
| | | Lipid:siRNA 10:1 | |
| LNP10 | (3aR,5s,6aS)-N,N-dimethyl-2,2- | ALN100/DSPC/Cholesterol/PEG-DMG | In-line |
| | di((9Z,12Z)-octadeca-9,12- | 50/10/38.5/1.5 | mixing |
| | dienyl)tetrahydro-3aH- | Lipid:siRNA 10:1 | |
| | cyclopenta[d][1,3] | | |
| | dioxol-5-amine (ALN100) | | |
| LNP11 | (6Z,9Z,28Z,31Z)-heptatriaconta- | MC-3/DSPC/Cholesterol/PEG-DMG | In-line |
| | 6,9,28,31-tetraen-19-yl 4- | 50/10/38.5/1.5 | mixing |
| | (dimethylamino)butanoate (MC3) | Lipid:siRNA 10:1 | |
| LNP12 | 1,1′-(2-(4-(2-((2-(bis(2- | Tech G1/DSPC/Cholesterol/PEG-DMG | In-line |
| | hydroxydodecyl)amino)ethyl)(2- | 50/10/38.5/1.5 | mixing |
| | hydroxydodecyl)amino)ethyl)piperazin- | Lipid:siRNA 10:1 | |
| | 1-yl)ethylazanediyl)didodecan-2-ol | | |
| | (Tech G1) | | |

[0170] LNP09 formulations and XTC comprising formulations are described, e.g., in U.S. Provisional Ser. No. 61/239,686, filed Sep. 3, 2009, which is hereby incorporated by reference. LNP11 formulations and MC3 comprising formulations are described, e.g., in U.S. Provisional Ser. No. 61/244,834, filed Sep. 22, 2009, which is hereby incorporated by reference.

[0171] Formulations prepared by either the standard or extrusion-free method can be characterized in similar manners. For example, formulations are typically characterized by visual inspection. They should be whitish translucent solutions free from aggregates or sediment. Particle size and particle size distribution of lipid-nanoparticles can be measured by light scattering using, for example, a Malvern Zetasizer Nano ZS (Malvern, USA). Particles should be about 20-300 nm, such as 40-100 nm in size. The particle size distribution should be unimodal. The total siRNA concentration in the formulation, as well as the entrapped fraction, is estimated using a dye exclusion assay. A sample of the formulated siRNA can be incubated with an RNA-binding dye, such as Ribogreen (Molecular Probes) in the presence or absence of a formulation disrupting surfactant, e.g., 0.5% Triton-X100. The total siRNA in the formulation can be determined by the signal from the sample containing the surfactant, relative to a standard curve. The entrapped fraction is determined by subtracting the “free” siRNA content (as measured by the signal in the absence of surfactant) from the total siRNA content. Percent entrapped siRNA is typically >85%. For SNALP formulation, the particle size is at least 30 nm, at least 40 nm, at least 50 nm, at least 60 nm, at least 70 nm, at least 80 nm, at least 90 nm, at least 100 nm, at least 110 nm, and at least 120 nm. The suitable range is typically about at least 50 nm to about at least 110 nm, about at least 60 nm to about at least 100 nm, or about at least 80 nm to about at least 90 nm.

[0172] Compositions and formulations for oral administration include powders or granules, microparticulates, nanoparticulates, suspensions or solutions in water or non-aqueous media, capsules, gel capsules, sachets, tablets or minitablets. Thickeners, flavoring agents, diluents, emulsifiers, dispersing aids or binders may be desirable. In some embodiments, oral formulations are those in which dsRNAs featured in the invention are administered in conjunction with one or more penetration enhancers surfactants and chelators. Suitable surfactants include fatty acids and/or esters or salts thereof, bile acids and/or salts thereof. Suitable bile acids/salts include chenodeoxycholic acid (CDCA) and ursodeoxychenodeoxycholic acid (UDCA), cholic acid, dehydrocholic acid, deoxycholic acid, glucholic acid, glycholic acid, glycodeoxycholic acid, taurocholic acid, taurodeoxycholic acid, sodium tauro-24,25-dihydro-fusidate and sodium glycodihydrofusidate. Suitable fatty acids include arachidonic acid, undecanoic acid, oleic acid, lauric acid, caprylic acid, capric acid, myristic acid, palmitic acid, stearic acid, linoleic acid, linolenic acid, dicaprate, tricaprate, monoolein, dilaurin, glyceryl 1-monocaprate, 1-dodecylazacycloheptan-2-one, an acylcarnitine, an acylcholine, or a monoglyceride, a diglyceride or a pharmaceutically acceptable salt thereof (e.g., sodium). In some embodiments, combinations of penetration enhancers are used, for example, fatty acids/salts in combination with bile acids/salts. One exemplary combination is the sodium salt of lauric acid, capric acid and UDCA. Further penetration enhancers include polyoxyethylene-9-lauryl ether, polyoxyethylene-20-cetyl ether. DsRNAs featured in the invention may be delivered orally, in granular form including sprayed dried particles, or complexed to form micro or nanoparticles. DsRNA complexing agents include poly-amino acids; polyimines; polyacrylates; polyalkylacrylates, polyoxethanes, polyalkylcyanoacrylates; cationized gelatins, albumins, starches, acrylates, polyethyleneglycols (PEG) and starches; polyalkylcyanoacrylates; DEAE-derivatized polyimines, pollulans, celluloses and starches. Suitable complexing agents include chitosan, N-trimethylchitosan, poly-L-lysine, polyhistidine, polyornithine, polyspermines, protamine, polyvinylpyridine, polythiodiethylaminomethylethylene P(TDAE), polyaminostyrene (e.g., p-amino), poly(methylcyanoacrylate), poly(ethylcyanoacrylate), poly(butylcyanoacrylate), poly(isobutylcyanoacrylate), poly(isohexylcynaoacrylate), DEAE-methacrylate, DEAE-hexylacrylate, DEAE-acrylamide, DEAE-albumin and DEAE-dextran, polymethylacrylate, polyhexylacrylate, poly(D,L-lactic acid), poly(DL-lactic-co-glycolic acid (PLGA), alginate, and polyethyleneglycol (PEG). Oral formulations for dsRNAs and their preparation are described in detail in U.S. Pat. No. 6,887,906, US Publn. No. 20030027780, and U.S. Pat. No. 6,747,014, each of which is incorporated herein by reference.

[0173] Compositions and formulations for parenteral, intraparenchymal (into the brain), intrathecal, intraventricular or intrahepatic administration may include sterile aqueous solutions which may also contain buffers, diluents and other suitable additives such as, but not limited to, penetration enhancers, carrier compounds and other pharmaceutically acceptable carriers or excipients.

[0174] Pharmaceutical compositions of the present invention include, but are not limited to, solutions, emulsions, and liposome-containing formulations. These compositions may be generated from a variety of components that include, but are not limited to, preformed liquids, self-emulsifying solids and self-emulsifying semisolids. Particularly preferred are formulations that target the liver when treating hepatic disorders such as hepatic carcinoma.

[0175] The pharmaceutical formulations of the present invention, which may conveniently be presented in unit dosage form, may be prepared according to conventional techniques well known in the pharmaceutical industry. Such techniques include the step of bringing into association the active ingredients with the pharmaceutical carrier(s) or excipient(s). In general, the formulations are prepared by uniformly and intimately bringing into association the active ingredients with liquid carriers or finely divided solid carriers or both, and then, if necessary, shaping the product.

[0176] The compositions of the present invention may be formulated into any of many possible dosage forms such as, but not limited to, tablets, capsules, gel capsules, liquid syrups, soft gels, suppositories, and enemas. The compositions of the present invention may also be formulated as suspensions in aqueous, non-aqueous or mixed media. Aqueous suspensions may further contain substances which increase the viscosity of the suspension including, for example, sodium carboxymethylcellulose, sorbitol and/or dextran. The suspension may also contain stabilizers.

### Emulsions

[0177] The compositions of the present invention may be prepared and formulated as emulsions. Emulsions are typically heterogeneous systems of one liquid dispersed in another in the form of droplets usually exceeding 0.1 μm in diameter (Idson, in Pharmaceutical Dosage Forms, Lieberman, Rieger and Banker (Eds.), 1988, Marcel Dekker, Inc., New York, N.Y., volume 1, p. 199; Rosoff, in Pharmaceutical Dosage Forms, Lieberman, Rieger and Banker (Eds.), 1988, Marcel Dekker, Inc., New York, N.Y., Volume 1, p. 245; Block in Pharmaceutical Dosage Forms, Lieberman, Rieger and Banker (Eds.), 1988, Marcel Dekker, Inc., New York, N.Y., volume 2, p. 335; Higuchi et al., in Remington's Pharmaceutical Sciences, Mack Publishing Co., Easton, Pa., 1985, p. 301). Emulsions are often biphasic systems comprising two immiscible liquid phases intimately mixed and dispersed with each other. In general, emulsions may be of either the water-in-oil (w/o) or the oil-in-water (o/w) variety. When an aqueous phase is finely divided into and dispersed as minute droplets into a bulk oily phase, the resulting composition is called a water-in-oil (w/o) emulsion. Alternatively, when an oily phase is finely divided into and dispersed as minute droplets into a bulk aqueous phase, the resulting composition is called an oil-in-water (o/w) emulsion. Emulsions may contain additional components in addition to the dispersed phases, and the active drug which may be present as a solution in either the aqueous phase, oily phase or itself as a separate phase. Pharmaceutical excipients such as emulsifiers, stabilizers, dyes, and anti-oxidants may also be present in emulsions as needed. Pharmaceutical emulsions may also be multiple emulsions that are comprised of more than two phases such as, for example, in the case of oil-in-water-in-oil (o/w/o) and water-in-oil-in-water (w/o/w) emulsions. Such complex formulations often provide certain advantages that simple binary emulsions do not. Multiple emulsions in which individual oil droplets of an o/w emulsion enclose small water droplets constitute a w/o/w emulsion. Likewise a system of oil droplets enclosed in globules of water stabilized in an oily continuous phase provides an o/w/o emulsion.

[0178] Emulsions are characterized by little or no thermodynamic stability. Often, the dispersed or discontinuous phase of the emulsion is well dispersed into the external or continuous phase and maintained in this form through the means of emulsifiers or the viscosity of the formulation. Either of the phases of the emulsion may be a semisolid or a solid, as is the case of emulsion-style ointment bases and creams. Other means of stabilizing emulsions entail the use of emulsifiers that may be incorporated into either phase of the emulsion. Emulsifiers may broadly be classified into four categories: synthetic surfactants, naturally occurring emulsifiers, absorption bases, and finely dispersed solids (Idson, in Pharmaceutical Dosage Forms, Lieberman, Rieger and Banker (Eds.), 1988, Marcel Dekker, Inc., New York, N.Y., volume 1, p. 199).

[0179] Synthetic surfactants, also known as surface active agents, have found wide applicability in the formulation of emulsions and have been reviewed in the literature (Rieger, in Pharmaceutical Dosage Forms, Lieberman, Rieger and Banker (Eds.), 1988, Marcel Dekker, Inc., New York, N.Y., volume 1, p. 285; Idson, in Pharmaceutical Dosage Forms, Lieberman, Rieger and Banker (Eds.), Marcel Dekker, Inc., New York, N.Y., 1988, volume 1, p. 199). Surfactants are typically amphiphilic and comprise a hydrophilic and a hydrophobic portion. The ratio of the hydrophilic to the hydrophobic nature of the surfactant has been termed the hydrophile/lipophile balance (HLB) and is a valuable tool in categorizing and selecting surfactants in the preparation of formulations. Surfactants may be classified into different classes based on the nature of the hydrophilic group: nonionic, anionic, cationic and amphoteric (Rieger, in Pharmaceutical Dosage Forms, Lieberman, Rieger and Banker (Eds.), 1988, Marcel Dekker, Inc., New York, N.Y., volume 1, p. 285).

[0180] Naturally occurring emulsifiers used in emulsion formulations include lanolin, beeswax, phosphatides, lecithin and acacia. Absorption bases possess hydrophilic properties such that they can soak up water to form w/o emulsions yet retain their semisolid consistencies, such as anhydrous lanolin and hydrophilic petrolatum. Finely divided solids have also been used as good emulsifiers especially in combination with surfactants and in viscous preparations. These include polar inorganic solids, such as heavy metal hydroxides, nonswelling clays such as bentonite, attapulgite, hectorite, kaolin, montmorillonite, colloidal aluminum silicate and colloidal magnesium aluminum silicate, pigments and nonpolar solids such as carbon or glyceryl tristearate.

[0181] A large variety of non-emulsifying materials are also included in emulsion formulations and contribute to the properties of emulsions. These include fats, oils, waxes, fatty acids, fatty alcohols, fatty esters, humectants, hydrophilic colloids, preservatives and antioxidants (Block, in Pharmaceutical Dosage Forms, Lieberman, Rieger and Banker (Eds.), 1988, Marcel Dekker, Inc., New York, N.Y., volume 1, p. 335; Idson, in Pharmaceutical Dosage Forms, Lieberman, Rieger and Banker (Eds.), 1988, Marcel Dekker, Inc., New York, N.Y., volume 1, p. 199).

[0182] Hydrophilic colloids or hydrocolloids include naturally occurring gums and synthetic polymers such as polysaccharides (for example, acacia, agar, alginic acid, carrageenan, guar gum, karaya gum, and tragacanth), cellulose derivatives (for example, carboxymethylcellulose and carboxypropylcellulose), and synthetic polymers (for example, carbomers, cellulose ethers, and carboxyvinyl polymers). These disperse or swell in water to form colloidal solutions that stabilize emulsions by forming strong interfacial films around the dispersed-phase droplets and by increasing the viscosity of the external phase.

[0183] Since emulsions often contain a number of ingredients such as carbohydrates, proteins, sterols and phosphatides that may readily support the growth of microbes, these formulations often incorporate preservatives. Commonly used preservatives included in emulsion formulations include methyl paraben, propyl paraben, quaternary ammonium salts, benzalkonium chloride, esters of p-hydroxybenzoic acid, and boric acid. Antioxidants are also commonly added to emulsion formulations to prevent deterioration of the formulation. Antioxidants used may be free radical scavengers such as tocopherols, alkyl gallates, butylated hydroxyanisole, butylated hydroxytoluene, or reducing agents such as ascorbic acid and sodium metabisulfite, and antioxidant synergists such as citric acid, tartaric acid, and lecithin.

[0184] The application of emulsion formulations via dermatological, oral and parenteral routes and methods for their manufacture have been reviewed in the literature (Idson, in Pharmaceutical Dosage Forms, Lieberman, Rieger and Banker (Eds.), 1988, Marcel Dekker, Inc., New York, N.Y., volume 1, p. 199). Emulsion formulations for oral delivery have been very widely used because of ease of formulation, as well as efficacy from an absorption and bioavailability standpoint (Rosoff, in Pharmaceutical Dosage Forms, Lieberman, Rieger and Banker (Eds.), 1988, Marcel Dekker, Inc., New York, N.Y., volume 1, p. 245; Idson, in Pharmaceutical Dosage Forms, Lieberman, Rieger and Banker (Eds.), 1988, Marcel Dekker, Inc., New York, N.Y., volume 1, p. 199). Mineral-oil base laxatives, oil-soluble vitamins and high fat nutritive preparations are among the materials that have commonly been administered orally as o/w emulsions.

[0185] In one embodiment of the present invention, the compositions of dsRNAs and nucleic acids are formulated as microemulsions. A microemulsion may be defined as a system of water, oil and amphiphile which is a single optically isotropic and thermodynamically stable liquid solution (Rosoff, in Pharmaceutical Dosage Forms, Lieberman, Rieger and Banker (Eds.), 1988, Marcel Dekker, Inc., New York, N.Y., volume 1, p. 245). Typically microemulsions are systems that are prepared by first dispersing an oil in an aqueous surfactant solution and then adding a sufficient amount of a fourth component, generally an intermediate chain-length alcohol to form a transparent system. Therefore, microemulsions have also been described as thermodynamically stable, isotropically clear dispersions of two immiscible liquids that are stabilized by interfacial films of surface-active molecules (Leung and Shah, in: Controlled Release of Drugs: Polymers and Aggregate Systems, Rosoff, M., Ed., 1989, VCH Publishers, New York, pages 185-215). Microemulsions commonly are prepared via a combination of three to five components that include oil, water, surfactant, cosurfactant and electrolyte. Whether the microemulsion is of the water-in-oil (w/o) or an oil-in-water (o/w) type is dependent on the properties of the oil and surfactant used and on the structure and geometric packing of the polar heads and hydrocarbon tails of the surfactant molecules (Schott, in Remington's Pharmaceutical Sciences, Mack Publishing Co., Easton, Pa., 1985, p. 271).

[0186] The phenomenological approach utilizing phase diagrams has been extensively studied and has yielded a comprehensive knowledge, to one skilled in the art, of how to formulate microemulsions (Rosoff, in Pharmaceutical Dosage Forms, Lieberman, Rieger and Banker (Eds.), 1988, Marcel Dekker, Inc., New York, N.Y., volume 1, p. 245; Block, in Pharmaceutical Dosage Forms, Lieberman, Rieger and Banker (Eds.), 1988, Marcel Dekker, Inc., New York, N.Y., volume 1, p. 335). Compared to conventional emulsions, microemulsions offer the advantage of solubilizing water-insoluble drugs in a formulation of thermodynamically stable droplets that are formed spontaneously.

[0187] Surfactants used in the preparation of microemulsions include, but are not limited to, ionic surfactants, non-ionic surfactants, Brij 96, polyoxyethylene oleyl ethers, polyglycerol fatty acid esters, tetraglycerol monolaurate (ML310), tetraglycerol monooleate (MO310), hexaglycerol monooleate (PO310), hexaglycerol pentaoleate (PO500), decaglycerol monocaprate (MCA750), decaglycerol monooleate (MO750), decaglycerol sequioleate (SO750), decaglycerol decaoleate (DAO750), alone or in combination with cosurfactants. The cosurfactant, usually a short-chain alcohol such as ethanol, 1-propanol, and 1-butanol, serves to increase the interfacial fluidity by penetrating into the surfactant film and consequently creating a disordered film because of the void space generated among surfactant molecules. Microemulsions may, however, be prepared without the use of cosurfactants and alcohol-free self-emulsifying microemulsion systems are known in the art. The aqueous phase may typically be, but is not limited to, water, an aqueous solution of the drug, glycerol, PEG300, PEG400, polyglycerols, propylene glycols, and derivatives of ethylene glycol. The oil phase may include, but is not limited to, materials such as Captex 300, Captex 355, Capmul MCM, fatty acid esters, medium chain (C8-C12) mono, di, and tri-glycerides, polyoxyethylated glyceryl fatty acid esters, fatty alcohols, polyglycolized glycerides, saturated polyglycolized C8-C10 glycerides, vegetable oils and silicone oil.

[0188] Microemulsions are particularly of interest from the standpoint of drug solubilization and the enhanced absorption of drugs. Lipid based microemulsions (both o/w and w/o) have been proposed to enhance the oral bioavailability of drugs, including peptides (Constantinides et al., Pharmaceutical Research, 1994, 11, 1385-1390; Ritschel, Meth. Find. Exp. Clin. Pharmacol., 1993, 13, 205). Microemulsions afford advantages of improved drug solubilization, protection of drug from enzymatic hydrolysis, possible enhancement of drug absorption due to surfactant-induced alterations in membrane fluidity and permeability, ease of preparation, ease of oral administration over solid dosage forms, improved clinical potency, and decreased toxicity (Constantinides et al., Pharmaceutical Research, 1994, 11, 1385; Ho et al., J. Pharm. Sci., 1996, 85, 138-143). Often microemulsions may form spontaneously when their components are brought together at ambient temperature. This may be particularly advantageous when formulating thermolabile drugs, peptides or dsRNAs. Microemulsions have also been effective in the transdermal delivery of active components in both cosmetic and pharmaceutical applications. It is expected that the microemulsion compositions and formulations of the present invention will facilitate the increased systemic absorption of dsRNAs and nucleic acids from the gastrointestinal tract, as well as improve the local cellular uptake of dsRNAs and nucleic acids.

[0189] Microemulsions of the present invention may also contain additional components and additives such as sorbitan monostearate (Grill 3), Labrasol, and penetration enhancers to improve the properties of the formulation and to enhance the absorption of the dsRNAs and nucleic acids of the present invention. Penetration enhancers used in the microemulsions of the present invention may be classified as belonging to one of five broad categories—surfactants, fatty acids, bile salts, chelating agents, and non-chelating non-surfactants (Lee et al., Critical Reviews in Therapeutic Drug Carrier Systems, 1991, p. 92). Each of these classes has been discussed above.

### Penetration Enhancers

[0190] In one embodiment, the present invention employs various penetration enhancers to effect the efficient delivery of nucleic acids, particularly dsRNAs, to the skin of animals. Most drugs are present in solution in both ionized and nonionized forms. However, usually only lipid soluble or lipophilic drugs readily cross cell membranes. It has been discovered that even non-lipophilic drugs may cross cell membranes if the membrane to be crossed is treated with a penetration enhancer. In addition to aiding the diffusion of non-lipophilic drugs across cell membranes, penetration enhancers also enhance the permeability of lipophilic drugs.

[0191] Penetration enhancers may be classified as belonging to one of five broad categories, i.e., surfactants, fatty acids, bile salts, chelating agents, and non-chelating non-surfactants (Lee et al., Critical Reviews in Therapeutic Drug Carrier Systems, 1991, p. 92). Each of the above mentioned classes of penetration enhancers are described below in greater detail.

[0192] Surfactants: In connection with the present invention, surfactants (or “surface-active agents”) are chemical entities which, when dissolved in an aqueous solution, reduce the surface tension of the solution or the interfacial tension between the aqueous solution and another liquid, with the result that absorption of dsRNAs through the mucosa is enhanced. In addition to bile salts and fatty acids, these penetration enhancers include, for example, sodium lauryl sulfate, polyoxyethylene-9-lauryl ether and polyoxyethylene-20-cetyl ether) (Lee et al., Critical Reviews in Therapeutic Drug Carrier Systems, 1991, p. 92); and perfluorochemical emulsions, such as FC-43. Takahashi et al., J. Pharm. Pharmacol., 1988, 40, 252).

[0193] Fatty acids: Various fatty acids and their derivatives which act as penetration enhancers include, for example, oleic acid, lauric acid, capric acid (n-decanoic acid), myristic acid, palmitic acid, stearic acid, linoleic acid, linolenic acid, dicaprate, tricaprate, monoolein (1-monooleoyl-rac-glycerol), dilaurin, caprylic acid, arachidonic acid, glycerol 1-monocaprate, 1-dodecylazacycloheptan-2-one, acylcarnitines, acylcholines, C.sub.1-10 alkyl esters thereof (e.g., methyl, isopropyl and t-butyl), and mono- and di-glycerides thereof (i.e., oleate, laurate, caprate, myristate, palmitate, stearate, linoleate, etc.) (Lee et al., Critical Reviews in Therapeutic Drug Carrier Systems, 1991, p. 92; Muranishi, Critical Reviews in Therapeutic Drug Carrier Systems, 1990, 7, 1-33; El Hariri et al., J. Pharm. Pharmacol., 1992, 44, 651-654).

[0194] Bile salts: The physiological role of bile includes the facilitation of dispersion and absorption of lipids and fat-soluble vitamins (Brunton, Chapter 38 in: Goodman & Gilman's The Pharmacological Basis of Therapeutics, 9th Ed., Hardman et al. Eds., McGraw-Hill, New York, 1996, pp. 934-935). Various natural bile salts, and their synthetic derivatives, act as penetration enhancers. Thus the term “bile salts” includes any of the naturally occurring components of bile as well as any of their synthetic derivatives. Suitable bile salts include, for example, cholic acid (or its pharmaceutically acceptable sodium salt, sodium cholate), dehydrocholic acid (sodium dehydrocholate), deoxycholic acid (sodium deoxycholate), glucholic acid (sodium glucholate), glycholic acid (sodium glycocholate), glycodeoxycholic acid (sodium glycodeoxycholate), taurocholic acid (sodium taurocholate), taurodeoxycholic acid (sodium taurodeoxycholate), chenodeoxycholic acid (sodium chenodeoxycholate), ursodeoxycholic acid (UDCA), sodium tauro-24,25-dihydro-fusidate (STDHF), sodium glycodihydrofusidate and polyoxyethylene-9-lauryl ether (POE) (Lee et al., Critical Reviews in Therapeutic Drug Carrier Systems, 1991, page 92; Swinyard, Chapter 39 In: Remington's Pharmaceutical Sciences, 18th Ed., Gennaro, ed., Mack Publishing Co., Easton, Pa., 1990, pages 782-783; Muranishi, Critical Reviews in Therapeutic Drug Carrier Systems, 1990, 7, 1-33; Yamamoto et al., J. Pharm. Exp. Ther., 1992, 263, 25; Yamashita et al., J. Pharm. Sci., 1990, 79, 579-583).

[0195] Chelating Agents: Chelating agents, as used in connection with the present invention, can be defined as compounds that remove metallic ions from solution by forming complexes therewith, with the result that absorption of dsRNAs through the mucosa is enhanced. With regards to their use as penetration enhancers in the present invention, chelating agents have the added advantage of also serving as DNase inhibitors, as most characterized DNA nucleases require a divalent metal ion for catalysis and are thus inhibited by chelating agents (Jarrett, J. Chromatogr., 1993, 618, 315-339). Suitable chelating agents include but are not limited to disodium ethylenediaminetetraacetate (EDTA), citric acid, salicylates (e.g., sodium salicylate, 5-methoxysalicylate and homovanilate), N-acyl derivatives of collagen, laureth-9 and N-amino acyl derivatives of beta-diketones (enamines) (Lee et al., Critical Reviews in Therapeutic Drug Carrier Systems, 1991, page 92; Muranishi, Critical Reviews in Therapeutic Drug Carrier Systems, 1990, 7, 1-33; Buur et al., J. Control Rel., 1990, 14, 43-51).

[0196] Non-chelating non-surfactants: As used herein, non-chelating non-surfactant penetration enhancing compounds can be defined as compounds that demonstrate insignificant activity as chelating agents or as surfactants but that nonetheless enhance absorption of dsRNAs through the alimentary mucosa (Muranishi, Critical Reviews in Therapeutic Drug Carrier Systems, 1990, 7, 1-33). This class of penetration enhancers include, for example, unsaturated cyclic ureas, 1-alkyl- and 1-alkenylazacyclo-alkanone derivatives (Lee et al., Critical Reviews in Therapeutic Drug Carrier Systems, 1991, page 92); and non-steroidal anti-inflammatory agents such as diclofenac sodium, indomethacin and phenylbutazone (Yamashita et al., J. Pharm. Pharmacol., 1987, 39, 621-626).

### Carriers

[0197] Certain compositions of the present invention also incorporate carrier compounds in the formulation. As used herein, “carrier compound” or “carrier” can refer to a nucleic acid, or analog thereof, which is inert (i.e., does not possess biological activity per se) but is recognized as a nucleic acid by in vivo processes that reduce the bioavailability of a nucleic acid having biological activity by, for example, degrading the biologically active nucleic acid or promoting its removal from circulation. The coadministration of a nucleic acid and a carrier compound, typically with an excess of the latter substance, can result in a substantial reduction of the amount of nucleic acid recovered in the liver, kidney or other extracirculatory reservoirs, presumably due to competition between the carrier compound and the nucleic acid for a common receptor. For example, the recovery of a partially phosphorothioate dsRNA in hepatic tissue can be reduced when it is coadministered with polyinosinic acid, dextran sulfate, polycytidic acid or 4-acetamido-4′isothiocyano-stilbene-2,2′-disulfonic acid (Miyao et al., DsRNA Res. Dev., 1995, 5, 115-121; Takakura et al., DsRNA & Nucl. Acid Drug Dev., 1996, 6, 177-183.

### Excipients

[0198] In contrast to a carrier compound, a “pharmaceutical carrier” or “excipient” is a pharmaceutically acceptable solvent, suspending agent or any other pharmacologically inert vehicle for delivering one or more nucleic acids to an animal. The excipient may be liquid or solid and is selected, with the planned manner of administration in mind, so as to provide for the desired bulk, consistency, etc., when combined with a nucleic acid and the other components of a given pharmaceutical composition. Typical pharmaceutical carriers include, but are not limited to, binding agents (e.g., pregelatinized maize starch, polyvinylpyrrolidone or hydroxypropyl methylcellulose, etc.); fillers (e.g., lactose and other sugars, microcrystalline cellulose, pectin, gelatin, calcium sulfate, ethyl cellulose, polyacrylates or calcium hydrogen phosphate, etc.); lubricants (e.g., magnesium stearate, talc, silica, colloidal silicon dioxide, stearic acid, metallic stearates, hydrogenated vegetable oils, corn starch, polyethylene glycols, sodium benzoate, sodium acetate, etc.); disintegrants (e.g., starch, sodium starch glycolate, etc.); and wetting agents (e.g., sodium lauryl sulphate, etc).

[0199] Pharmaceutically acceptable organic or inorganic excipients suitable for non-parenteral administration which do not deleteriously react with nucleic acids can also be used to formulate the compositions of the present invention. Suitable pharmaceutically acceptable carriers include, but are not limited to, water, salt solutions, alcohols, polyethylene glycols, gelatin, lactose, amylose, magnesium stearate, talc, silicic acid, viscous paraffin, hydroxymethylcellulose, polyvinylpyrrolidone and the like.

[0200] Formulations for topical administration of nucleic acids may include sterile and non-sterile aqueous solutions, non-aqueous solutions in common solvents such as alcohols, or solutions of the nucleic acids in liquid or solid oil bases. The solutions may also contain buffers, diluents and other suitable additives. Pharmaceutically acceptable organic or inorganic excipients suitable for non-parenteral administration which do not deleteriously react with nucleic acids can be used.

[0201] Suitable pharmaceutically acceptable excipients include, but are not limited to, water, salt solutions, alcohol, polyethylene glycols, gelatin, lactose, amylose, magnesium stearate, talc, silicic acid, viscous paraffin, hydroxymethylcellulose, polyvinylpyrrolidone and the like.

### Other Components

[0202] The compositions of the present invention may additionally contain other adjunct components conventionally found in pharmaceutical compositions, at their art-established usage levels. Thus, for example, the compositions may contain additional, compatible, pharmaceutically-active materials such as, for example, antipruritics, astringents, local anesthetics or anti-inflammatory agents, or may contain additional materials useful in physically formulating various dosage forms of the compositions of the present invention, such as dyes, flavoring agents, preservatives, antioxidants, opacifiers, thickening agents and stabilizers. However, such materials, when added, should not unduly interfere with the biological activities of the components of the compositions of the present invention. The formulations can be sterilized and, if desired, mixed with auxiliary agents, e.g., lubricants, preservatives, stabilizers, wetting agents, emulsifiers, salts for influencing osmotic pressure, buffers, colorings, flavorings and/or aromatic substances and the like which do not deleteriously interact with the nucleic acid(s) of the formulation.

[0203] Aqueous suspensions may contain substances which increase the viscosity of the suspension including, for example, sodium carboxymethylcellulose, sorbitol and/or dextran. The suspension may also contain stabilizers.

[0204] In some embodiments, pharmaceutical compositions featured in the invention include (a) one or more dsRNA compounds and (b) one or more anti-cytokine biologic agents which function by a non-RNAi mechanism. Examples of such biologics include, biologics that target IL1β (e.g., anakinra), IL6 (tocilizumab), or TNF (etanercept, infliximab, adlimumab, or certolizumab).

[0205] Toxicity and therapeutic efficacy of such compounds can be determined by standard pharmaceutical procedures in cell cultures or experimental animals, e.g., for determining the LD50 (the dose lethal to 50% of the population) and the ED50 (the dose therapeutically effective in 50% of the population). The dose ratio between toxic and therapeutic effects is the therapeutic index and it can be expressed as the ratio LD50/ED50. Compounds that exhibit high therapeutic indices are preferred.

[0206] The data obtained from cell culture assays and animal studies can be used in formulating a range of dosage for use in humans. The dosage of compositions featured in the invention lies generally within a range of circulating concentrations that include the ED50 with little or no toxicity. The dosage may vary within this range depending upon the dosage form employed and the route of administration utilized. For any compound used in the methods featured in the invention, the therapeutically effective dose can be estimated initially from cell culture assays. A dose may be formulated in animal models to achieve a circulating plasma concentration range of the compound or, when appropriate, of the polypeptide product of a target sequence (e.g., achieving a decreased concentration of the polypeptide) that includes the IC50 (i.e., the concentration of the test compound which achieves a half-maximal inhibition of symptoms) as determined in cell culture. Such information can be used to more accurately determine useful doses in humans. Levels in plasma may be measured, for example, by high performance liquid chromatography.

[0207] In addition to their administration, as discussed above, the dsRNAs featured in the invention can be administered in combination with other known agents effective in treatment of pathological processes mediated by TTR expression. In any event, the administering physician can adjust the amount and timing of dsRNA administration on the basis of results observed using standard measures of efficacy known in the art or described herein.

### Methods for Treating Diseases Caused by Expression of a TTR Gene

[0208] The invention relates in particular to the use of a dsRNA targeting TTR and compositions containing at least one such dsRNA for the treatment of a TTR-mediated disorder or disease. For example, a dsRNA targeting a TTR gene can be useful for the treatment of a TTR amyloidosis, such as familial amyloidotic polyneuropathy (FAP), familial amyloidotic cardiomyopathy (FAC), leptomeningeal/CNS amyloidosis, amyloidosis VII form (also known as leptomeningeal or meningocerebrovascular amyloidosis), hyperthyroxinemia, and cardiac amyloidosis (also called senile systemic amyloidosis (SSA) and senile cardiac amyloidosis (SCA)).

[0209] FIG. 15 illustrates symptoms and mutations in TTR associated with familial amyloidotic neuropathy, familial amyloidotic cardiomyopathy and CNS amyloidosis. The invention includes compositions and methods for treatment of these diseases and symptoms, and directed to these mutant versions of TTR.

[0210] A dsRNA targeting a TTR gene is also used for treatment of symptoms and disorders, such as TTR amyloidosis. Symptoms associated with such amyloidosis include, e.g., seizures, dementia, myelopathy, polyneuropathy, carpal tunnel syndrome, autonomic insufficiency, cardiomyopathy, gastrointestinal dysfunction (e.g., gastric ulcers, diarrhea, constipation, malabsorption), weight loss, hepatomegaly, lymphadenopathy, goiter, vitreous opacities, renal insufficiency (including proteinuria and kidney failure), nephropathy, cranial nerve dysfunction, corneal lattice dystrophy, and congestive heart failure with generalized weakness and difficulties breathing from fluid retention.

[0211] Owing to the inhibitory effects on TTR expression, a composition according to the invention or a pharmaceutical composition prepared therefrom can enhance the quality of life.

[0212] The invention further relates to the use of a dsRNA or a pharmaceutical composition thereof, e.g., for treating a TTR amyloidosis, in combination with other pharmaceuticals and/or other therapeutic methods, e.g., with known pharmaceuticals and/or known therapeutic methods, such as, for example, those which are currently employed for treating these disorders. In one example, a dsRNA targeting TTR can be administered in combination with a liver transplant. In other examples, a dsRNA targeting TTR can be administered in combination with a pharmaceutical or therapeutic method for treating a symptom of a TTR disease, such as diuretics, ACE (angiotensin converting enzyme) inhibitors, angiotensin receptor blockers (ARBs), or dialysis, e.g., for management of renal function.

[0213] The dsRNA and an additional therapeutic agent can be administered in the same combination, e.g., parenterally, or the additional therapeutic agent can be administered as part of a separate composition or by another method described herein.

[0214] The invention features a method of administering a dsRNA targeting TTR to a patient having a disease or disorder mediated by TTR expression, such as a TTR amyloidosis, e.g., FAP. Administration of the dsRNA can stabilize and improve peripheral neurological function, for example, in a patient with FAP. Patients can be administered a therapeutic amount of dsRNA, such as 0.1 mg/kg, 0.2 mg/kg, 0.5 mg/kg, 1.0 mg/kg, 1.5 mg/kg, 2.0 mg/kg, or 2.5 mg/kg dsRNA. The dsRNA can be administered by intravenous infusion over a period of time, such as over a 5 minute, 10 minute, 15 minute, 20 minute, 25 minute, 60 minute, 120 minute or 180 minute period. The administration is repeated, for example, on a regular basis, such as biweekly (i.e., every two weeks) for one month, two months, three months, four months or longer. After an initial treatment regimen, the treatments can be administered on a less frequent basis. For example, after administration biweekly for three months, administration can be repeated once per month, for six months or a year or longer. Administration of the dsRNA can reduce TTR levels in the blood or urine of the patient by at least 20%, 25%, 30%, 40%, 50%, 60%, 70%, 80% or 90% or more.

[0215] Before administration of a full dose of the dsRNA, patients can be administered a smaller dose, such as a dose that is 5% of the full dose, and monitored for adverse effects, such as an allergic reaction or a change in liver function. For example, in patients monitored for changes in liver function, a low incidence of LFT (Liver Function Test) change (e.g., a 10-20% incidence of LFT) is acceptable (e.g., a reversible, 3-fold increase in ALT (alanine aminotransferase) and/or AST (aspartate aminotransferase) levels).

[0216] Many TTR-associated diseases and disorders are hereditary. Therefore, a patient in need of a TTR dsRNA can be identified by taking a family history. A healthcare provider, such as a doctor, nurse, or family member, can take a family history before prescribing or administering a TTR dsRNA. A DNA test may also be performed on the patient to identify a mutation in the TTR gene, before a TTR dsRNA is administered to the patient.

[0217] The patient may have a biopsy performed before receiving a TTR dsRNA. The biopsy can be, for example, on a tissue, such as the gastric mucosa, peripheral nerve, skin, abdominal fat, liver, or kidney, and the biopsy may reveal amyloid plaques, which are indicative of a TTR-mediated disorder. Upon the identification of amyloid plaques, the patient is administered a TTR dsRNA.

### Methods for Inhibiting Expression of a TTR Gene

[0218] In yet another aspect, the invention provides a method for inhibiting the expression of a TTR gene in a mammal. The method includes administering a composition featured in the invention to the mammal such that expression of the target TTR gene is silenced.

[0219] When the organism to be treated is a mammal such as a human, the composition may be administered by any means known in the art including, but not limited to oral or parenteral routes, including intracranial (e.g., intraventricular, intraparenchymal and intrathecal), intravenous, intramuscular, subcutaneous, transdermal, airway (aerosol), nasal, rectal, and topical (including buccal and sublingual) administration. In certain embodiments, the compositions are administered by intravenous infusion or injection.

[0220] Unless otherwise defined, all technical and scientific terms used herein have the same meaning as commonly understood by one of ordinary skill in the art to which this invention belongs. Although methods and materials similar or equivalent to those described herein can be used in the practice or testing of the dsRNAs and methods featured in the invention, suitable methods and materials are described below. All publications, patent applications, patents, and other references mentioned herein are incorporated by reference in their entirety. In case of conflict, the present specification, including definitions, will control. In addition, the materials, methods, and examples are illustrative only and not intended to be limiting.

### Examples

### Example 1. dsRNA Synthesis

### Source of Reagents

[0221] Where the source of a reagent is not specifically given herein, such reagent may be obtained from any supplier of reagents for molecular biology at a quality/purity standard for application in molecular biology.

siRNA Synthesis

[0222] Single-stranded RNAs were produced by solid phase synthesis on a scale of 1 μmole using an Expedite 8909 synthesizer (Applied Biosystems, Applera Deutschland GmbH, Darmstadt, Germany) and controlled pore glass (CPG, 500 Å, Proligo Biochemie GmbH, Hamburg, Germany) as solid support. RNA and RNA containing 2′-O-methyl nucleotides were generated by solid phase synthesis employing the corresponding phosphoramidites and 2′-O-methyl phosphoramidites, respectively (Proligo Biochemie GmbH, Hamburg, Germany). These building blocks were incorporated at selected sites within the sequence of the oligoribonucleotide chain using standard nucleoside phosphoramidite chemistry such as described in Current protocols in nucleic acid chemistry, Beaucage, S. L. et al. (Edrs.), John Wiley & Sons, Inc., New York, NY, USA. Phosphorothioate linkages were introduced by replacement of the iodine oxidizer solution with a solution of the Beaucage reagent (Chruachem Ltd, Glasgow, UK) in acetonitrile (1%). Further ancillary reagents were obtained from Mallinckrodt Baker (Griesheim, Germany).

[0223] Deprotection and purification of the crude oligoribonucleotides by anion exchange HPLC were carried out according to established procedures. Yields and concentrations were determined by UV absorption of a solution of the respective RNA at a wavelength of 260 nm using a spectral photometer (DU 640B, Beckman Coulter GmbH, Unterschleißheim, Germany). Double stranded RNA was generated by mixing an equimolar solution of complementary strands in annealing buffer (20 mM sodium phosphate, pH 6.8; 100 mM sodium chloride), heated in a water bath at 85-90° C. for 3 minutes and cooled to room temperature over a period of 3-4 hours. The annealed RNA solution was stored at −20° C. until use.

[0224] For the synthesis of 3′-cholesterol-conjugated siRNAs (herein referred to as -Chol-3′), an appropriately modified solid support was used for RNA synthesis. The modified solid support was prepared as follows:

### Diethyl-2-azabutane-1,4-dicarboxylate AA

[chemical structure]

[0225] A 4.7 M aqueous solution of sodium hydroxide (50 mL) was added into a stirred, ice-cooled solution of ethyl glycinate hydrochloride (32.19 g, 0.23 mole) in water (50 mL). Then, ethyl acrylate (23.1 g, 0.23 mole) was added and the mixture was stirred at room temperature until completion of the reaction was ascertained by TLC. After 19 h the solution was partitioned with dichloromethane (3×100 mL). The organic layer was dried with anhydrous sodium sulfate, filtered and evaporated. The residue was distilled to afford AA (28.8 g, 61%).

### 3-{Ethoxycarbonylmethyl-[6-(9H-fluoren-9-ylmethoxycarbonyl-amino)-hexanoyl]-amino}-propionic acid ethyl ester AB

[chemical structure]

[0226] Fmoc-6-amino-hexanoic acid (9.12 g, 25.83 mmol) was dissolved in dichloromethane (50 mL) and cooled with ice. Diisopropylcarbodiimde (3.25 g, 3.99 mL, 25.83 mmol) was added to the solution at 0° C. It was then followed by the addition of Diethyl-azabutane-1,4-dicarboxylate (5 g, 24.6 mmol) and dimethylamino pyridine (0.305 g, 2.5 mmol). The solution was brought to room temperature and stirred further for 6 h. Completion of the reaction was ascertained by TLC. The reaction mixture was concentrated under vacuum and ethyl acetate was added to precipitate diisopropyl urea. The suspension was filtered. The filtrate was washed with 5% aqueous hydrochloric acid, 5% sodium bicarbonate and water. The combined organic layer was dried over sodium sulfate and concentrated to give the crude product which was purified by column chromatography (50% EtOAC/Hexanes) to yield 11.87 g (88%) of AB.

### 3-[(6-Amino-hexanoyl)-ethoxycarbonylmethyl-amino]-propionic acid ethyl ester AC

[chemical structure]

[0227] 3-{Ethoxycarbonylmethyl-[6-(9H-fluoren-9-ylmethoxycarbonylamino)-hexanoyl]-amino}-propionic acid ethyl ester AB (11.5 g, 21.3 mmol) was dissolved in 20% piperidine in dimethylformamide at 0° C. The solution was continued stirring for 1 h. The reaction mixture was concentrated under vacuum, water was added to the residue, and the product was extracted with ethyl acetate. The crude product was purified by conversion into its hydrochloride salt.

### 3-({6-[17-(1,5-Dimethyl-hexyl)-10,13-dimethyl-2,3,4,7,8,9,10,11,12,13,14,15,16,17-tetradecahydro-1H-cyclopenta[a]phenanthren-3-yloxycarbonylamino]-hexanoyl}ethoxycarbonylmethyl-amino)-propionic acid ethyl ester AD

[chemical structure]

[0228] The hydrochloride salt of 3-[(6-Amino-hexanoyl)-ethoxycarbonylmethyl-amino]-propionic acid ethyl ester AC (4.7 g, 14.8 mmol) was taken up in dichloromethane. The suspension was cooled to 0° C. on ice. To the suspension diisopropylethylamine (3.87 g, 5.2 mL, 30 mmol) was added. To the resulting solution cholesteryl chloroformate (6.675 g, 14.8 mmol) was added. The reaction mixture was stirred overnight. The reaction mixture was diluted with dichloromethane and washed with 10% hydrochloric acid. The product was purified by flash chromatography (10.3 g, 92%).

### 1-{6-[17-(1,5-Dimethyl-hexyl)-10,13-dimethyl-2,3,4,7,8,9,10,11,12,13,14,15,16,17-tetradecahydro-1H-cyclopenta[a] phenanthren-3-yloxycarbonylamino]-hexanoyl}-4-oxo-pyrrolidine-3-carboxylic acid ethyl ester AE

[chemical structure]

[0229] Potassium t-butoxide (1.1 g, 9.8 mmol) was slurried in 30 mL of dry toluene. The mixture was cooled to 0° C. on ice and 5 g (6.6 mmol) of diester AD was added slowly with stirring within 20 mins. The temperature was kept below 5° C. during the addition. The stirring was continued for 30 mins at 0° C. and 1 mL of glacial acetic acid was added, immediately followed by 4 g of NaH₂PO4·H₂O in 40 mL of water The resultant mixture was extracted twice with 100 mL of dichloromethane each and the combined organic extracts were washed twice with 10 mL of phosphate buffer each, dried, and evaporated to dryness. The residue was dissolved in 60 mL of toluene, cooled to 0° C. and extracted with three 50 mL portions of cold pH 9.5 carbonate buffer. The aqueous extracts were adjusted to pH 3 with phosphoric acid, and extracted with five 40 mL portions of chloroform which were combined, dried and evaporated to dryness. The residue was purified by column chromatography using 25% ethylacetate/hexane to afford 1.9 g of b-ketoester (39%).

### [6-(3-Hydroxy-4-hydroxymethyl-pyrrolidin-1-yl)-6-oxo-hexyl]-carbamic acid 17-(1,5-dimethyl-hexyl)-10,13-dimethyl-2,3,4,7,8,9,10,11,12,13,14,15,16,17-tetradecahydro-1H-cyclopenta[a]phenanthren-3-yl ester AF

[chemical structure]

[0230] Methanol (2 mL) was added dropwise over a period of 1 h to a refluxing mixture of b-ketoester AE (1.5 g, 2.2 mmol) and sodium borohydride (0.226 g, 6 mmol) in tetrahydrofuran (10 mL). Stirring was continued at reflux temperature for 1 h. After cooling to room temperature, 1 N HCl (12.5 mL) was added, the mixture was extracted with ethylacetate (3×40 mL). The combined ethylacetate layer was dried over anhydrous sodium sulfate and concentrated under vacuum to yield the product which was purified by column chromatography (10% MeOH/CHCl₃) (89%).

### (6-{3-[Bis-(4-methoxy-phenyl)-phenyl-methoxymethyl]-4-hydroxy-pyrrolidin-1-yl}-6-oxo-hexyl)-carbamic acid 17-(1,5-dimethyl-hexyl)-10,13-dimethyl-2,3,4,7,8,9,10,11,12,13,14,15,16,17-tetradecahydro-1H-cyclopenta[a]phenanthren-3-yl ester AG

[chemical structure]

[0231] Diol AF (1.25 gm 1.994 mmol) was dried by evaporating with pyridine (2×5 mL) in vacuo. Anhydrous pyridine (10 mL) and 4,4′-dimethoxytritylchloride (0.724 g, 2.13 mmol) were added with stirring. The reaction was carried out at room temperature overnight. The reaction was quenched by the addition of methanol. The reaction mixture was concentrated under vacuum and to the residue dichloromethane (50 mL) was added. The organic layer was washed with 1M aqueous sodium bicarbonate. The organic layer was dried over anhydrous sodium sulfate, filtered and concentrated. The residual pyridine was removed by evaporating with toluene. The crude product was purified by column chromatography (2% MeOH/Chloroform, Rf=0.5 in 5% MeOH/CHCl₃) (1.75 g, 95%).

### Succinic Acid mono-(4-[bis-(4-methoxy-phenyl)-phenyl-methoxymethyl]-1-{6-[17-(1,5-dimethyl-hexyl)-10,13-dimethyl 2,3,4,7,8,9,10,11,12,13,14,15,16,17-tetradecahydro-1H cyclopenta[a]phenanthren-3-yloxycarbonylamino]-hexanoyl}-pyrrolidin-3-yl) ester AH

[chemical structure]

[0232] Compound AG (1.0 g, 1.05 mmol) was mixed with succinic anhydride (0.150 g, 1.5 mmol) and DMAP (0.073 g, 0.6 mmol) and dried in a vacuum at 40° C. overnight. The mixture was dissolved in anhydrous dichloroethane (3 mL), triethylamine (0.318 g, 0.440 mL, 3.15 mmol) was added and the solution was stirred at room temperature under argon atmosphere for 16 h. It was then diluted with dichloromethane (40 mL) and washed with ice cold aqueous citric acid (5 wt %, 30 mL) and water (2×20 mL). The organic phase was dried over anhydrous sodium sulfate and concentrated to dryness. The residue was used as such for the next step.

### Cholesterol Derivatised CPG AI

[chemical structure]

[0233] Succinate AH (0.254 g, 0.242 mmol) was dissolved in a mixture of dichloromethane/acetonitrile (3:2, 3 mL). To that solution DMAP (0.0296 g, 0.242 mmol) in acetonitrile (1.25 mL), 2,2′-Dithio-bis(5-nitropyridine) (0.075 g, 0.242 mmol) in acetonitrile/dichloroethane (3:1, 1.25 mL) were added successively. To the resulting solution triphenylphosphine (0.064 g, 0.242 mmol) in acetonitrile (0.6 ml) was added. The reaction mixture turned bright orange in color. The solution was agitated briefly using a wrist-action shaker (5 mins). Long chain alkyl amine-CPG (LCAA-CPG) (1.5 g, 61 mM) was added. The suspension was agitated for 2 h. The CPG was filtered through a sintered funnel and washed with acetonitrile, dichloromethane and ether successively. Unreacted amino groups were masked using acetic anhydride/pyridine. The achieved loading of the CPG was measured by taking UV measurement (37 mM/g).

[0234] The synthesis of siRNAs bearing a 5′-12-dodecanoic acid bisdecylamide group (herein referred to as “5′-C32-”) or a 5′-cholesteryl derivative group (herein referred to as “5′-Chol-”) was performed as described in WO 2004/065601, except that, for the cholesteryl derivative, the oxidation step was performed using the Beaucage reagent in order to introduce a phosphorothioate linkage at the 5′-end of the nucleic acid oligomer.

[0235] Nucleic acid sequences are represented below using standard nomenclature, and specifically the abbreviations of Table 1.

TABLE 1
Abbreviations of nucleotide monomers used in nucleic
acid sequence representation. It will be understood
that these monomers, when present in an oligonucleotide,
are mutually linked by 5′-3′-phosphodiester bonds.

| Abbreviation | Nucleotide(s) |
|---|---|
| A | adenosine-3′-phosphate |
| C | cytidine-3′-phosphate |
| G | guanosine-3′-phosphate |
| T | 5-methyluridine-3′-phosphate |
| U | uridine-3′-phosphate |
| N | any nucleotide (G, A, C, or T) |
| a | 2′-O-methyladenosine-3′-phosphate |
| c | 2′-O-methylcytidine-3′-phosphate |
| g | 2′-O-methylguanosine-3′-phosphate |
| u | 2′-O-methyluridine-3′-phosphate |
| dT | 2′-deoxythymidine-3′-phosphate |
| sT; sdT | 2′-deoxy-thymidine-5′phosphate-phosphorothioate |

### Example 2A. TTR siRNA Design

### Transcripts

[0236] siRNA design was carried out to identify siRNAs targeting the gene transthyretin from human (symbol TTR) and rat (symbol Ttr). The design used the TTR transcripts NM_000371.2 (SEQ ID NO:1329) (human) and NM_012681.1 (SEQ ID NO:1330) (rat) from the NCBI Refseq collection. The siRNA duplexes were designed with 100% identity to their respective TTR genes.

siRNA Design and Specificity Prediction

[0237] The predicted specificity of all possible 19mers was determined for each sequence. The TTR siRNAs were used in a comprehensive search against the human and rat transcriptomes (defined as the set of NM_ and XM_records within the NCBI Refseq set) using the FASTA algorithm. The Python script ‘offtargetFasta.py’ was then used to parse the alignments and generate a score based on the position and number of mismatches between the siRNA and any potential ‘off-target’ transcript. The off-target score is weighted to emphasize differences in the ‘seed’ region of siRNAs, in positions 2-9 from the 5′ end of the molecule. The off-target score is calculated as follows: mismatches between the oligo and the transcript are given penalties. A mismatch in the seed region in positions 2-9 of the oligo is given a penalty of 2.8; mismatches in the putative cleavage sites 10 and 11 are given a penalty of 1.2, and mismatches in positions 12-19 a penalty of 1. Mismatches in position 1 are not considered. The off-target score for each oligo-transcript pair is then calculated by summing the mismatch penalties. The lowest off-target score from all the oligo-transcript pairs is then determined and used in subsequent sorting of oligos. Both siRNA strands were assigned to a category of specificity according to the calculated scores: a score above 3 qualifies as highly specific, equal to 3 as specific, and between 2.2 and 2.8 as moderately specific. In picking which oligos to synthesize, off-target scores of the antisense strand were sorted from high to low, and the 144 best (lowest off-target score) oligo pairs from human, and the best 26 pairs from rat were selected.

siRNA Sequence Selection

[0238] A total of 140 sense and 140 antisense human TTR derived siRNA oligos were synthesized and formed into duplexes. A total of 26 sense and 26 antisense rat TTR derived siRNA oligos were synthesized and formed into duplexes. Duplexes included The oligos are presented in Tables 2-4 (human TTR) and Tables 5-7 (rat TTR).

TABLE 2
Identification numbers for human TTR dsRNAs
See Table 4 for sequences and modifications of oligos.

| | Sense | Antisense |
|---|---|---|
| Duplex # | Oligo # | Oligo # |
| AD-18243 | A-32153 | A-32154 |
| AD-18244 | A-32155 | A-32156 |
| AD-18245 | A-32157 | A-32158 |
| AD-18246 | A-32159 | A-32160 |
| AD-18247 | A-32163 | A-32164 |
| AD-18248 | A-32165 | A-32166 |
| AD-18249 | A-32167 | A-32168 |
| AD-18250 | A-32169 | A-32170 |
| AD-18251 | A-32171 | A-32172 |
| AD-18252 | A-32175 | A-32176 |
| AD-18253 | A-32177 | A-32178 |
| AD-18254 | A-32179 | A-32180 |
| AD-18255 | A-32181 | A-32182 |
| AD-18256 | A-32183 | A-32184 |
| AD-18257 | A-32187 | A-32188 |
| AD-18258 | A-32189 | A-32190 |
| AD-18259 | A-32191 | A-32192 |
| AD-18260 | A-32193 | A-32194 |
| AD-18261 | A-32195 | A-32196 |
| AD-18262 | A-32199 | A-32200 |
| AD-18263 | A-32201 | A-32202 |
| AD-18264 | A-32203 | A-32204 |
| AD-18265 | A-32205 | A-32206 |
| AD-18266 | A-32207 | A-32208 |
| AD-18267 | A-32211 | A-32212 |
| AD-18268 | A-32213 | A-32214 |
| AD-18269 | A-32215 | A-32216 |
| AD-18270 | A-32217 | A-32218 |
| AD-18271 | A-32219 | A-32220 |
| AD-18272 | A-32221 | A-32222 |
| AD-18273 | A-32223 | A-32224 |
| AD-18274 | A-32225 | A-32226 |
| AD-18275 | A-32227 | A-32228 |
| AD-18276 | A-32229 | A-32230 |
| AD-18277 | A-32231 | A-32232 |
| AD-18278 | A-32233 | A-32234 |
| AD-18279 | A-32235 | A-32236 |
| AD-18280 | A-32237 | A-32238 |
| AD-18281 | A-32239 | A-32240 |
| AD-18282 | A-32241 | A-32242 |
| AD-18283 | A-32243 | A-32244 |
| AD-18284 | A-32247 | A-32248 |
| AD-18285 | A-32249 | A-32250 |
| AD-18286 | A-32251 | A-32252 |
| AD-18287 | A-32253 | A-32254 |
| AD-18288 | A-32255 | A-32256 |
| AD-18289 | A-32259 | A-32260 |
| AD-18290 | A-32261 | A-32262 |
| AD-18291 | A-32263 | A-32264 |
| AD-18292 | A-32265 | A-32266 |
| AD-18293 | A-32267 | A-32268 |
| AD-18294 | A-32269 | A-32270 |
| AD-18295 | A-32271 | A-32272 |
| AD-18296 | A-32273 | A-32274 |
| AD-18297 | A-32275 | A-32276 |
| AD-18298 | A-32277 | A-32278 |
| AD-18299 | A-32279 | A-32280 |
| AD-18300 | A-32281 | A-32282 |
| AD-18301 | A-32283 | A-32284 |
| AD-18302 | A-32285 | A-32286 |
| AD-18303 | A-32287 | A-32288 |
| AD-18304 | A-32289 | A-32290 |
| AD-18305 | A-32291 | A-32292 |
| AD-18306 | A-32295 | A-32296 |
| AD-18307 | A-32297 | A-32298 |
| AD-18308 | A-32299 | A-32300 |
| AD-18309 | A-32301 | A-32302 |
| AD-18310 | A-32303 | A-32304 |
| AD-18311 | A-32307 | A-32308 |
| AD-18312 | A-32309 | A-32310 |
| AD-18313 | A-32311 | A-32312 |
| AD-18314 | A-32313 | A-32314 |
| AD-18315 | A-32315 | A-32316 |
| AD-18316 | A-32319 | A-32320 |
| AD-18317 | A-32321 | A-32322 |
| AD-18318 | A-32323 | A-32324 |
| AD-18319 | A-32325 | A-32326 |
| AD-18320 | A-32327 | A-32328 |
| AD-18321 | A-32331 | A-32332 |
| AD-18322 | A-32333 | A-32334 |
| AD-18323 | A-32335 | A-32336 |
| AD-18324 | A-32337 | A-32338 |
| AD-18325 | A-32339 | A-32340 |
| AD-18326 | A-32341 | A-32342 |
| AD-18327 | A-32343 | A-32344 |
| AD-18328 | A-32345 | A-32346 |
| AD-18329 | A-32347 | A-32348 |
| AD-18330 | A-32349 | A-32350 |
| AD-18331 | A-32351 | A-32352 |
| AD-18332 | A-32353 | A-32354 |
| AD-18333 | A-32355 | A-32356 |
| AD-18334 | A-32357 | A-32358 |
| AD-18335 | A-32359 | A-32360 |
| AD-18336 | A-32363 | A-32364 |
| AD-18337 | A-32367 | A-32368 |
| AD-18338 | A-32369 | A-32370 |
| AD-18339 | A-32371 | A-32372 |
| AD-18340 | A-32373 | A-32374 |
| AD-18341 | A-32375 | A-32376 |
| AD-18342 | A-32379 | A-32380 |
| AD-18343 | A-32381 | A-32382 |
| AD-18344 | A-32383 | A-32384 |
| AD-18345 | A-32385 | A-32386 |
| AD-18346 | A-32387 | A-32388 |
| AD-18347 | A-32391 | A-32392 |
| AD-18348 | A-32393 | A-32394 |
| AD-18349 | A-32395 | A-32396 |
| AD-18350 | A-32397 | A-32398 |
| AD-18351 | A-32399 | A-32400 |
| AD-18352 | A-32401 | A-32402 |
| AD-18353 | A-32403 | A-32404 |
| AD-18354 | A-32405 | A-32406 |
| AD-18355 | A-32407 | A-32408 |
| AD-18356 | A-32409 | A-32410 |
| AD-18357 | A-32411 | A-32412 |
| AD-18358 | A-32415 | A-32416 |
| AD-18359 | A-32417 | A-32418 |
| AD-18360 | A-32419 | A-32420 |
| AD-18361 | A-32421 | A-32422 |
| AD-18362 | A-32423 | A-32424 |
| AD-18363 | A-32427 | A-32428 |
| AD-18364 | A-32429 | A-32430 |
| AD-18446 | A-32161 | A-32162 |
| AD-18447 | A-32173 | A-32174 |
| AD-18448 | A-32185 | A-32186 |
| AD-18449 | A-32197 | A-32198 |
| AD-18450 | A-32209 | A-32210 |
| AD-18451 | A-32245 | A-32246 |
| AD-18452 | A-32257 | A-32258 |
| AD-18453 | A-32293 | A-32294 |
| AD-18454 | A-32305 | A-32306 |
| AD-18455 | A-32317 | A-32318 |
| AD-18456 | A-32329 | A-32330 |
| AD-18457 | A-32361 | A-32362 |
| AD-18458 | A-32365 | A-32366 |
| AD-18459 | A-32377 | A-32378 |
| AD-18460 | A-32389 | A-32390 |
| AD-18461 | A-32401 | A-32402 |
| AD-18462 | A-32413 | A-32414 |
| AD-18463 | A-32425 | A-32426 |

TABLE 3A
Sense and antisense strand sequences of human TTR dsRNAs
Strand: s = sense; as = antisense;
Position: position of 5′ base on transcript
(NM_000371.2, SEQ ID NO: 1329)

| | | | SEQ | Sequence with 3′ | SEQ |
|---|---|---|---|---|---|
| | | Sequence | ID | dinucleotide overhang | ID |
| Strand | Position | (5′ to 3′) | NO: | (5′ to 3′) | NO: |
| S | 100 | CCGGUGAAUCCAAGUGUCC | 1 | CCGGUGAAUCCAAGUGUCCNN | 281 |
| as | 118 | GGACACUUGGAUUCACCGG | 2 | GGACACUUGGAUUCACCGGNN | 282 |
| S | 11 | ACUCAUUCUUGGCAGGAUG | 3 | ACUCAUUCUUGGCAGGAUGNN | 283 |
| as | 29 | CAUCCUGCCAAGAAUGAGU | 4 | CAUCCUGCCAAGAAUGAGUNN | 284 |
| S | 111 | AAGUGUCCUCUGAUGGUCA | 5 | AAGUGUCCUCUGAUGGUCANN | 285 |
| as | 129 | UGACCAUCAGAGGACACUU | 6 | UGACCAUCAGAGGACACUUNN | 286 |
| S | 13 | UCAUUCUUGGCAGGAUGGC | 7 | UCAUUCUUGGCAGGAUGGCNN | 287 |
| as | 31 | GCCAUCCUGCCAAGAAUGA | 8 | GCCAUCCUGCCAAGAAUGANN | 288 |
| s | 130 | AAGUUCUAGAUGCUGUCCG | 9 | AAGUUCUAGAUGCUGUCCGNN | 289 |
| as | 148 | CGGACAGCAUCUAGAACUU | 10 | CGGACAGCAUCUAGAACUUNN | 290 |
| s | 132 | GUUCUAGAUGCUGUCCGAG | 11 | GUUCUAGAUGCUGUCCGAGNN | 291 |
| as | 150 | CUCGGACAGCAUCUAGAAC | 12 | CUCGGACAGCAUCUAGAACNN | 292 |
| s | 135 | CUAGAUGCUGUCCGAGGCA | 13 | CUAGAUGCUGUCCGAGGCANN | 293 |
| as | 153 | UGCCUCGGACAGCAUCUAG | 14 | UGCCUCGGACAGCAUCUAGNN | 294 |
| s | 138 | GAUGCUGUCCGAGGCAGUC | 15 | GAUGCUGUCCGAGGCAGUCNN | 295 |
| as | 156 | GACUGCCUCGGACAGCAUC | 16 | GACUGCCUCGGACAGCAUCNN | 296 |
| s | 14 | CAUUCUUGGCAGGAUGGCU | 17 | CAUUCUUGGCAGGAUGGCUNN | 297 |
| as | 32 | AGCCAUCCUGCCAAGAAUG | 18 | AGCCAUCCUGCCAAGAAUGNN | 298 |
| s | 140 | UGCUGUCCGAGGCAGUCCU | 19 | UGCUGUCCGAGGCAGUCCUNN | 299 |
| as | 158 | AGGACUGCCUCGGACAGCA | 20 | AGGACUGCCUCGGACAGCANN | 300 |
| s | 146 | CCGAGGCAGUCCUGCCAUC | 21 | CCGAGGCAGUCCUGCCAUCNN | 301 |
| as | 164 | GAUGGCAGGACUGCCUCGG | 22 | GAUGGCAGGACUGCCUCGGNN | 302 |
| s | 152 | CAGUCCUGCCAUCAAUGUG | 23 | CAGUCCUGCCAUCAAUGUGNN | 303 |
| as | 170 | CACAUUGAUGGCAGGACUG | 24 | CACAUUGAUGGCAGGACUGNN | 304 |
| s | 164 | CAAUGUGGCCGUGCAUGUG | 25 | CAAUGUGGCCGUGCAUGUGNN | 305 |
| as | 182 | CACAUGCACGGCCACAUUG | 26 | CACAUGCACGGCCACAUUGNN | 306 |
| s | 178 | AUGUGUUCAGAAAGGCUGC | 27 | AUGUGUUCAGAAAGGCUGCNN | 307 |
| as | 196 | GCAGCCUUUCUGAACACAU | 28 | GCAGCCUUUCUGAACACAUNN | 308 |
| s | 2 | CAGAAGUCCACUCAUUCUU | 29 | CAGAAGUCCACUCAUUCUUNN | 309 |
| as | 20 | AAGAAUGAGUGGACUUCUG | 30 | AAGAAUGAGUGGACUUCUGNN | 310 |
| s | 21 | GGCAGGAUGGCUUCUCAUC | 31 | GGCAGGAUGGCUUCUCAUCNN | 311 |
| as | 39 | GAUGAGAAGCCAUCCUGCC | 32 | GAUGAGAAGCCAUCCUGCCNN | 312 |
| s | 210 | GAGCCAUUUGCCUCUGGGA | 33 | GAGCCAUUUGCCUCUGGGANN | 313 |
| as | 228 | UCCCAGAGGCAAAUGGCUC | 34 | UCCCAGAGGCAAAUGGCUCNN | 314 |
| s | 23 | CAGGAUGGCUUCUCAUCGU | 35 | CAGGAUGGCUUCUCAUCGUNN | 315 |
| as | 41 | ACGAUGAGAAGCCAUCCUG | 36 | ACGAUGAGAAGCCAUCCUGNN | 316 |
| s | 24 | AGGAUGGCUUCUCAUCGUC | 37 | AGGAUGGCUUCUCAUCGUCNN | 317 |
| as | 42 | GACGAUGAGAAGCCAUCCU | 38 | GACGAUGAGAAGCCAUCCUNN | 318 |
| s | 245 | AGAGCUGCAUGGGCUCACA | 39 | AGAGCUGCAUGGGCUCACANN | 319 |
| as | 263 | UGUGAGCCCAUGGAGCUCU | 40 | UGUGAGCCCAUGGAGCUCUNN | 320 |
| s | 248 | GCUGCAUGGGCUCACAACU | 41 | GCUGCAUGGGCUCACAACUNN | 321 |
| as | 266 | AGUUGUGAGCCCAUGGAGC | 42 | AGUUGUGAGCCCAUGGAGCNN | 322 |
| s | 25 | GGAUGGCUUCUCAUCGUCU | 43 | GGAUGGCUUCUCAUCGUCUNN | 323 |
| as | 43 | AGACGAUGAGAAGCCAUCC | 44 | AGACGAUGAGAAGCCAUCCNN | 324 |
| s | 251 | GCAUGGGCUCACAACUGAG | 45 | GCAUGGGCUCACAACUGAGNN | 325 |
| as | 269 | CUCAGUUGUGAGCCCAUGC | 46 | CUCAGUUGUGAGCCCAUGCNN | 326 |
| s | 253 | AUGGGCUCACAACUGAGGA | 47 | AUGGGCUCACAACUGAGGANN | 327 |
| as | 271 | UCCUCAGUUGUGAGCCCAU | 48 | UCCUCAGUUGUGAGCCCAUNN | 328 |
| s | 254 | UGGGCUCACAACUGAGGAG | 49 | UGGGCUCACAACUGAGGAGNN | 329 |
| as | 272 | CUCCUCAGUUGUGAGCCCA | 50 | CUCCUCAGUUGUGAGCCCANN | 330 |
| s | 270 | GAGGAAUUUGUAGAAGGGA | 51 | GAGGAAUUUGUAGAAGGGANN | 331 |
| as | 288 | UCCCUUCUACAAAUUCCUC | 52 | UCCCUUCUACAAAUUCCUCNN | 332 |
| s | 276 | UUUGUAGAAGGGAUAUACA | 53 | UUUGUAGAAGGGAUAUACANN | 333 |
| as | 294 | UGUAUAUCCCUUCUACAAA | 54 | UGUAUAUCCCUUCUACAAANN | 334 |
| s | 277 | UUGUAGAAGGGAUAUACAA | 55 | UUGUAGAAGGGAUAUACAANN | 335 |
| as | 295 | UUGUAUAUCCCUUCUACAA | 56 | UUGUAUAUCCCUUCUACAANN | 336 |
| s | 278 | UGUAGAAGGGAUAUACAAA | 57 | UGUAGAAGGGAUAUACAAANN | 337 |
| as | 296 | UUUGUAUAUCCCUUCUACA | 58 | UUUGUAUAUCCCUUCUACANN | 338 |
| s | 281 | AGAAGGGAUAUACAAAGUG | 59 | AGAAGGGAUAUACAAAGUGNN | 339 |
| as | 299 | CACUUUGUAUAUCCCUUCU | 60 | CACUUUGUAUAUCCCUUCUNN | 340 |
| s | 295 | AAGUGGAAAUAGACACCAA | 61 | AAGUGGAAAUAGACACCAANN | 341 |
| as | 313 | UUGGUGUCUAUUUCCACUU | 62 | UUGGUGUCUAUUUCCACUUNN | 342 |
| s | 299 | GGAAAUAGACACCAAAUCU | 63 | GGAAAUAGACACCAAAUCUNN | 343 |
| as | 317 | AGAUUUGGUGUCUAUUUCC | 64 | AGAUUUGGUGUCUAUUUCCNN | 344 |
| s | 300 | GAAAUAGACACCAAAUCUU | 65 | GAAAUAGACACCAAAUCUUNN | 345 |
| as | 318 | AAGAUUUGGUGUCUAUUUC | 66 | AAGAUUUGGUGUCUAUUUCNN | 346 |
| s | 303 | AUAGACACCAAAUCUUACU | 67 | AUAGACACCAAAUCUUACUNN | 347 |
| as | 321 | AGUAAGAUUUGGUGUCUAU | 68 | AGUAAGAUUUGGUGUCUAUNN | 348 |
| s | 304 | UAGACACCAAAUCUUACUG | 69 | UAGACACCAAAUCUUACUGNN | 349 |
| as | 322 | CAGUAAGAUUUGGUGUCUA | 70 | CAGUAAGAUUUGGUGUCUANN | 350 |
| s | 305 | AGACACCAAAUCUUACUGG | 71 | AGACACCAAAUCUUACUGGNN | 351 |
| as | 323 | CCAGUAAGAUUUGGUGUCU | 72 | CCAGUAAGAUUUGGUGUCUNN | 352 |
| s | 317 | UUACUGGAAGGCACUUGGC | 73 | UUACUGGAAGGCACUUGGCNN | 353 |
| as | 335 | GCCAAGUGCCUUCCAGUAA | 74 | GCCAAGUGCCUUCCAGUAANN | 354 |
| s | 32 | UUCUCAUCGUCUGCUCCUC | 75 | UUCUCAUCGUCUGCUCCUCNN | 355 |
| as | 50 | GAGGAGCAGACGAUGAGAA | 76 | GAGGAGCAGACGAUGAGAANN | 356 |
| s | 322 | GGAAGGCACUUGGCAUCUC | 77 | GGAAGGCACUUGGCAUCUCNN | 357 |
| as | 340 | GAGAUGCCAAGUGCCUUCC | 78 | GAGAUGCCAAGUGCCUUCCNN | 358 |
| s | 326 | GGCACUUGGCAUCUCCCCA | 79 | GGCACUUGGCAUCUCCCCANN | 359 |
| as | 344 | UGGGGAGAUGCCAAGUGCC | 80 | UGGGGAGAUGCCAAGUGCCNN | 360 |
| s | 333 | GGCAUCUCCCCAUUCCAUG | 81 | GGCAUCUCCCCAUUCCAUGNN | 361 |
| as | 351 | AUGGAAUGGGGAGAUGCCTT | 82 | AUGGAAUGGGGAGAUGCCTTNN | 362 |
| s | 334 | GCAUCUCCCCAUUCCAUGA | 83 | GCAUCUCCCCAUUCCAUGANN | 363 |
| as | 352 | UCAUGGAAUGGGGAGAUGC | 84 | UCAUGGAAUGGGGAGAUGCNN | 364 |
| s | 335 | CAUCUCCCCAUUCCAUGAG | 85 | CAUCUCCCCAUUCCAUGAGNN | 365 |
| as | 353 | CUCAUGGAAUGGGGAGAUG | 86 | CUCAUGGAAUGGGGAGAUGNN | 366 |
| s | 336 | AUCUCCCCAUUCCAUGAGC | 87 | AUCUCCCCAUUCCAUGAGCNN | 367 |
| as | 354 | GCUCAUGGAAUGGGGAGAU | 88 | GCUCAUGGAAUGGGGAGAUNN | 368 |
| s | 338 | CUCCCCAUUCCAUGAGCAU | 89 | CUCCCCAUUCCAUGAGCAUNN | 369 |
| as | 356 | AUGCUCAUGGAAUGGGGAG | 90 | AUGCUCAUGGAAUGGGGAGNN | 370 |
| s | 341 | CCCAUUCCAUGAGCAUGCA | 91 | CCCAUUCCAUGAGCAUGCANN | 371 |
| as | 359 | UGCAUGCUCAUGGAAUGGG | 92 | UGCAUGCUCAUGGAAUGGGNN | 372 |
| s | 347 | CCAUGAGCAUGCAGAGGUG | 93 | CCAUGAGCAUGCAGAGGUGNN | 373 |
| as | 365 | CACCUCUGCAUGCUCAUGG | 94 | CACCUCUGCAUGCUCAUGGNN | 374 |
| s | 352 | AGCAUGCAGAGGUGGUAUU | 95 | AGCAUGCAGAGGUGGUAUUNN | 375 |
| as | 370 | AAUACCACCUCUGCAUGCU | 96 | AAUACCACCUCUGCAUGCUNN | 376 |
| s | 354 | CAUGCAGAGGUGGUAUUCA | 97 | CAUGCAGAGGUGGUAUUCANN | 377 |
| as | 372 | UGAAUACCACCUCUGCAUG | 98 | UGAAUACCACCUCUGCAUGNN | 378 |
| s | 355 | AUGCAGAGGUGGUAUUCAC | 99 | AUGCAGAGGUGGUAUUCACNN | 379 |
| as | 373 | GUGAAUACCACCUCUGCAU | 100 | GUGAAUACCACCUCUGCAUNN | 380 |
| s | 362 | GGUGGUAUUCACAGCCAAC | 101 | GGUGGUAUUCACAGCCAACNN | 381 |
| as | 380 | GUUGGCUGUGAAUACCACC | 102 | GUUGGCUGUGAAUACCACCNN | 382 |
| s | 363 | GUGGUAUUCACAGCCAACG | 103 | GUGGUAUUCACAGCCAACGNN | 383 |
| as | 381 | CGUUGGCUGUGAAUACCAC | 104 | CGUUGGCUGUGAAUACCACNN | 384 |
| s | 364 | UGGUAUUCACAGCCAACGA | 105 | UGGUAUUCACAGCCAACGANN | 385 |
| as | 382 | UCGUUGGCUGUGAAUACCA | 106 | UCGUUGGCUGUGAAUACCANN | 386 |
| s | 365 | GGUAUUCACAGCCAACGAC | 107 | GGUADUCACAGCCAACGACNN | 387 |
| as | 383 | GUCGUUGGCUGUGAAUACC | 108 | GUCGUUGGCUGUGAAUACCNN | 388 |
| s | 366 | GUAUUCACAGCCAACGACU | 109 | GUAUUCACAGCCAACGACUNN | 389 |
| as | 384 | AGUCGUUGGCUGUGAAUAC | 110 | AGUCGUUGGCUGUGAAUACNN | 390 |
| s | 367 | UAUUCACAGCCAACGACUC | 111 | UAUUCACAGCCAACGACUCNN | 391 |
| as | 385 | GAGUCGUUGGCUGUGAAUA | 112 | GAGUCGUUGGCUGUGAAUANN | 392 |
| s | 370 | UCACAGCCAACGACUCCGG | 113 | UCACAGCCAACGACUCCGGNN | 393 |
| as | 388 | CCGGAGUCGUUGGCUGUGA | 114 | CCGGAGUCGUUGGCUGUGANN | 394 |
| s | 390 | CCCCGCCGCUACACCAUUG | 115 | CCCCGCCGCUACACCAUUGNN | 395 |
| as | 408 | CAAUGGUGUAGCGGCGGGG | 116 | CAAUGGUGUAGCGGCGGGGNN | 396 |
| s | 4 | GAAGUCCACUCAUUCUUGG | 117 | GAAGUCCACUCAUUCUUGGNN | 397 |
| as | 22 | CCAAGAAUGAGUGGACUUC | 118 | CCAAGAAUGAGUGGACUUCNN | 398 |
| s | 412 | CCCUGCUGAGCCCCUACUC | 119 | CCCUGCUGAGCCCCUACUCNN | 399 |
| as | 430 | GAGUAGGGGCUCAGCAGGG | 120 | GAGUAGGGGCUCAGCAGGGNN | 400 |
| s | 417 | CUGAGCCCCUACUCCUAUU | 121 | CUGAGCCCCUACUCCUAUUNN | 401 |
| as | 435 | AAUAGGAGUAGGGGCUCAG | 122 | AAUAGGAGUAGGGGCUCAGNN | 402 |
| s | 418 | UGAGCCCCUACUCCUAUUC | 123 | UGAGCCCCUACUCCUAUUCNN | 403 |
| as | 436 | GAAUAGGAGUAGGGGCUCA | 124 | GAAUAGGAGUAGGGGCUCANN | 404 |
| s | 422 | CCCCUACUCCUAUUCCACC | 125 | CCCCUACUCCUAUUCCACCNN | 405 |
| as | 440 | GGUGGAAUAGGAGUAGGGG | 126 | GGUGGAAUAGGAGUAGGGGNN | 406 |
| s | 425 | CUACUCCUAUUCCACCACG | 127 | CUACUCCUAUUCCACCACGNN | 407 |
| as | 443 | CGUGGUGGAAUAGGAGUAG | 128 | CGUGGUGGAAUAGGAGUAGNN | 408 |
| s | 426 | UACUCCUAUUCCACCACGG | 129 | UACUCCUAUUCCACCACGGNN | 409 |
| as | 444 | CCGUGGUGGAAUAGGAGUA | 130 | CCGUGGUGGAAUAGGAGUANN | 410 |
| s | 427 | ACUCCUAUUCCACCACGGC | 131 | ACUCCUAUUCCACCACGGCNN | 411 |
| as | 445 | GCCGUGGUGGAAUAGGAGU | 132 | GCCGUGGUGGAAUAGGAGUNN | 412 |
| s | 429 | UCCUAUUCCACCACGGCUG | 133 | UCCUAUUCCACCACGGCUGNN | 413 |
| as | 447 | CAGCCGUGGUGGAAUAGGA | 134 | CAGCCGUGGUGGAAUAGGANN | 414 |
| s | 432 | UAUUCCACCACGGCUGUCG | 135 | UAUUCCACCACGGCUGUCGNN | 415 |
| as | 450 | CGACAGCCGUGGUGGAAUA | 136 | CGACAGCCGUGGUGGAAUANN | 416 |
| s | 433 | AUUCCACCACGGCUGUCGU | 137 | AUUCCACCACGGCUGUCGUNN | 417 |
| as | 451 | ACGACAGCCGUGGUGGAAU | 138 | ACGACAGCCGUGGUGGAAUNN | 418 |
| s | 437 | CACCACGGCUGUCGUCACC | 139 | CACCACGGCUGUCGUCACCNN | 419 |
| as | 455 | GGUGACGACAGCCGUGGUG | 140 | GGUGACGACAGCCGUGGUGNN | 420 |
| s | 438 | ACCACGGCUGUCGUCACCA | 141 | ACCACGGCUGUCGUCACCANN | 421 |
| as | 456 | UGGUGACGACAGCCGUGGU | 142 | UGGUGACGACAGCCGUGGUNN | 422 |
| s | 439 | CCACGGCUGUCGUCACCAA | 143 | CCACGGCUGUCGUCACCAANN | 423 |
| as | 457 | UUGGUGACGACAGCCGUGG | 144 | UUGGUGACGACAGCCGUGGNN | 424 |
| s | 441 | ACGGCUGUCGUCACCAAUC | 145 | ACGGCUGUCGUCACCAAUCNN | 425 |
| as | 459 | GAUUGGUGACGACAGCCGU | 146 | GAUUGGUGACGACAGCCGUNN | 426 |
| s | 442 | CGGCUGUCGUCACCAAUCC | 147 | CGGCUGUCGUCACCAAUCCNN | 427 |
| as | 460 | GGAUUGGUGACGACAGCCG | 148 | GGAUUGGUGACGACAGCCGNN | 428 |
| s | 449 | CGUCACCAAUCCCAAGGAA | 149 | CGUCACCAAUCCCAAGGAANN | 429 |
| as | 467 | UUCCUUGGGAUUGGUGACG | 150 | UUCCUUGGGAUUGGUGACGNN | 430 |
| s | 455 | CAAUCCCAAGGAAUGAGGG | 151 | CAAUCCCAAGGAAUGAGGGNN | 431 |
| as | 473 | CCCUCAUUCCUUGGGAUUG | 152 | CCCUCAUUCCUUGGGAUUGNN | 432 |
| s | 491 | CCUGAAGGACGAGGGAUGG | 153 | CCUGAAGGACGAGGGAUGGNN | 433 |
| as | 509 | CCAUCCCUCGUCCUUCAGG | 154 | CCAUCCCUCGUCCUUCAGGNN | 434 |
| s | 497 | GGACGAGGGAUGGGAUUUC | 155 | GGACGAGGGAUGGGAUUUCNN | 435 |
| as | 515 | GAAAUCCCAUCCCUCGUCC | 156 | GAAAUCCCAUCCCUCGUCCNN | 436 |
| s | 5 | AAGUCCACUCAUUCUUGGC | 157 | AAGUCCACUCAUUCUUGGCNN | 437 |
| as | 23 | GCCAAGAAUGAGUGGACUU | 158 | GCCAAGAAUGAGUGGACUUNN | 438 |
| s | 508 | GGGAUUUCAUGUAACCAAG | 159 | GGGAUUUCAUGUAACCAAGNN | 439 |
| as | 526 | CUUGGUUACAUGAAAUCCC | 160 | CUUGGUUACAUGAAAUCCCNN | 440 |
| s | 509 | GGAUUUCAUGUAACCAAGA | 161 | GGAUUUCAUGUAACCAAGANN | 441 |
| as | 527 | UCUUGGUUACAUGAAAUCC | 162 | UCUUGGUUACAUGAAAUCCNN | 442 |
| s | 514 | UCAUGUAACCAAGAGUAUU | 163 | UCAUGUAACCAAGAGUAUUNN | 443 |
| as | 532 | AAUACUCUUGGUUACAUGA | 164 | AAUACUCUUGGUUACAUGANN | 444 |
| s | 516 | AUGUAACCAAGAGUAUUCC | 165 | AUGUAACCAAGAGUAUUCCNN | 445 |
| as | 534 | GGAAUACUCUUGGUUACAU | 166 | GGAAUACUCUUGGUUACAUNN | 446 |
| s | 517 | UGUAACCAAGAGUAUUCCA | 167 | UGUAACCAAGAGUAUUCCANN | 447 |
| as | 535 | UGGAAUACUCUUGGUUACA | 168 | UGGAAUACUCUUGGUUACANN | 448 |
| s | 518 | GUAACCAAGAGUAUUCCAU | 169 | GUAACCAAGAGUAUUCCAUNN | 449 |
| as | 536 | AUGGAAUACUCUUGGUUAC | 170 | AUGGAAUACUCUUGGUUACNN | 450 |
| s | 54 | UGCCUUGCUGGACUGGUAU | 171 | UGCCUUGCUGGACUGGUAUNN | 451 |
| as | 72 | AUACCAGUCCAGCAAGGCA | 172 | AUACCAGUCCAGCAAGGCANN | 452 |
| s | 543 | UAAAGCAGUGUUUUCACCU | 173 | UAAAGCAGUGUUUUCACCUNN | 453 |
| as | 561 | AGGUGAAAACACUGCUUUA | 174 | AGGUGAAAACACUGCUUUANN | 454 |
| s | 55 | GCCUUGCUGGACUGGUAUU | 175 | GCCUUGCUGGACUGGUAUUNN | 455 |
| as | 73 | AAUACCAGUCCAGCAAGGC | 176 | AAUACCAGUCCAGCAAGGCNN | 456 |
| s | 551 | UGUUUUCACCUCAUAUGCU | 177 | UGUUUUCACCUCAUAUGCUNN | 457 |
| as | 569 | AGCAUAUGAGGUGAAAACA | 178 | AGCADAUGAGGUGAAAACANN | 458 |
| s | 552 | GUUUUCACCUCAUAUGCUA | 179 | GUUUUCACCUCAUAUGCUANN | 459 |
| as | 570 | UAGCAUAUGAGGUGAAAAC | 180 | UAGCAUAUGAGGUGAAAACNN | 460 |
| s | 553 | UUUUCACCUCAUAUGCUAU | 181 | UUUUCACCUCAUAUGCUAUNN | 461 |
| as | 571 | AUAGCAUAUGAGGUGAAAA | 182 | AUAGCAUAUGAGGUGAAAANN | 462 |
| s | 555 | UUCACCUCAUAUGCUAUGU | 183 | UUCACCUCAUAUGCUAUGUNN | 463 |
| as | 573 | ACAUAGCAUAUGAGGUGAA | 184 | ACAUAGCAUAUGAGGUGAANN | 464 |
| s | 557 | CACCUCAUAUGCUAUGUUA | 185 | CACCUCAUAUGCUAUGUUANN | 465 |
| as | 575 | UAACAUAGCAUAUGAGGUG | 186 | UAACAUAGCAUAUGAGGUGNN | 466 |
| s | 56 | CCUUGCUGGACUGGUAUUU | 187 | CCUUGCUGGACUGGUAUUUNN | 467 |
| as | 74 | AAAUACCAGUCCAGCAAGG | 188 | AAAUACCAGUCCAGCAAGGNN | 468 |
| s | 563 | AUAUGCUAUGUUAGAAGUC | 189 | AUAUGCUAUGUUAGAAGUCNN | 469 |
| as | 581 | GACUUCUAACAUAGCAUAU | 190 | GACUUCUAACAUAGCAUAUNN | 470 |
| s | 564 | UAUGCUAUGUUAGAAGUCC | 191 | UAUGCUAUGUUAGAAGUCCNN | 471 |
| as | 582 | GGACUUCUAACAUAGCAUA | 192 | GGACUUCUAACAUAGCAUANN | 472 |
| s | 566 | UGCUAUGUUAGAAGUCCAG | 193 | UGCUAUGUUAGAAGUCCAGNN | 473 |
| as | 584 | CUGGACUUCUAACAUAGCA | 194 | CUGGACUUCUAACAUAGCANN | 474 |
| s | 57 | CUUGCUGGACUGGUAUUUG | 195 | CUUGCUGGACUGGUAUUUGNN | 475 |
| as | 75 | CAAAUACCAGUCCAGCAAG | 196 | CAAAUACCAGUCCAGCAAGNN | 476 |
| s | 578 | AGUCCAGGCAGAGACAAUA | 197 | AGUCCAGGCAGAGACAAUANN | 477 |
| as | 596 | AUUGUCUCUGCCUGGACUTT | 198 | AUUGUCUCUGCCUGGACUTTNN | 478 |
| s | 580 | UCCAGGCAGAGACAAUAAA | 199 | UCCAGGCAGAGACAAUAAANN | 479 |
| as | 598 | UUUAUUGUCUCUGCCUGGA | 200 | UUUADUGUCUCUGCCUGGANN | 480 |
| s | 607 | GUGAAAGGCACUUUUCAUU | 201 | GUGAAAGGCACUUUUCAUUNN | 481 |
| as | 625 | AAUGAAAAGUGCCUUUCAC | 202 | AAUGAAAAGUGCCUUUCACNN | 482 |
| s | 62 | UGGACUGGUAUUUGUGUCU | 203 | UGGACUGGUAUUUGUGUCUNN | 483 |
| as | 80 | AGACACAAAUACCAGUCCA | 204 | AGACACAAAUACCAGUCCANN | 484 |
| s | 77 | GUCUGAGGCUGGCCCUACG | 205 | GUCUGAGGCUGGCCCUACGNN | 485 |
| as | 95 | CGUAGGGCCAGCCUCAGAC | 206 | CGUAGGGCCAGCCUCAGACNN | 486 |
| s | 79 | CUGAGGCUGGCCCUACGGG | 207 | CUGAGGCUGGCCCUACGGGNN | 487 |
| as | 97 | CCCGUAGGGCCAGCCUCAG | 208 | CCCGUAGGGCCAGCCUCAGNN | 488 |
| s | 81 | GAGGCUGGCCCUACGGGCA | 209 | GAGGCUGGCCCUACGGGCANN | 489 |
| as | 99 | UGCCCGUAGGGCCAGCCUC | 210 | UGCCCGUAGGGCCAGCCUCNN | 490 |
| s | 82 | AGGCUGGCCCUACGGGCAC | 211 | AGGCUGGCCCUACGGGCACNN | 491 |
| as | 100 | GUGCCCGUAGGGCCAGCCU | 212 | GUGCCCGUAGGGCCAGCCUNN | 492 |
| s | 84 | GCUGGCCCUACGGGCACCG | 213 | GCUGGCCCUACGGGCACCGNN | 493 |
| as | 102 | CGGUGCCCGUAGGGCCAGC | 214 | CGGUGCCCGUAGGGCCAGCNN | 494 |
| s | 85 | CUGGCCCUACGGGCACCGG | 215 | CUGGCCCUACGGGCACCGGNN | 495 |
| as | 103 | CCGGUGCCCGUAGGGCCAG | 216 | CCGGUGCCCGUAGGGCCAGNN | 496 |
| s | 87 | GGCCCUACGGGCACCGGUG | 217 | GGCCCUACGGGCACCGGUGNN | 497 |
| as | 105 | CACCGGUGCCCGUAGGGCC | 218 | CACCGGUGCCCGUAGGGCCNN | 498 |
| s | 9 | CCACUCAUUCUUGGCAGGA | 219 | CCACUCAUUCUUGGCAGGANN | 499 |
| as | 27 | UCCUGCCAAGAAUGAGUGG | 220 | UCCUGCCAAGAAUGAGUGGNN | 500 |
| s | 90 | CCUACGGGCACCGGUGAAU | 221 | CCUACGGGCACCGGUGAAUNN | 501 |
| as | 108 | AUUCACCGGUGCCCGUAGG | 222 | AUUCACCGGUGCCCGUAGGNN | 502 |
| s | 91 | CUACGGGCACCGGUGAAUC | 223 | CUACGGGCACCGGUGAAUCNN | 503 |
| as | 109 | GAUUCACCGGUGCCCGUAG | 224 | GAUUCACCGGUGCCCGUAGNN | 504 |
| s | 92 | UACGGGCACCGGUGAAUCC | 225 | UACGGGCACCGGUGAAUCCNN | 505 |
| as | 110 | GGAUUCACCGGUGCCCGUA | 226 | GGAUUCACCGGUGCCCGUANN | 506 |
| s | 93 | ACGGGCACCGGUGAAUCCA | 227 | ACGGGCACCGGUGAAUCCANN | 507 |
| as | 111 | UGGAUUCACCGGUGCCCGU | 228 | UGGAIJUCACCGGUGCCCGUNN | 508 |
| s | 97 | GCACCGGUGAAUCCAAGUG | 229 | GCACCGGUGAAUCCAAGUGNN | 509 |
| as | 115 | CACUUGGAUUCACCGGUGC | 230 | CACUUGGAUUCACCGGUGCNN | 510 |
| s | 98 | CACCGGUGAAUCCAAGUGU | 231 | CACCGGUGAAUCCAAGUGUNN | 511 |
| as | 116 | ACACUUGGAUUCACCGGUG | 232 | ACACUUGGAUUCACCGGUGNN | 512 |
| s | 167 | UGUGGCCAUGCAUGUGUUC | 233 | UGUGGCCAUGCAUGUGUUCNN | 513 |
| as | 185 | GAACACAUGCAUGGCCACA | 234 | GAACACAUGCAUGGCCACANN | 514 |
| s | 168 | GUGGCCAUGCAUGUGUUCA | 235 | GUGGCCAUGCAUGUGUUCANN | 515 |
| as | 186 | UGAACACAUGCAUGGCCAC | 236 | UGAACACAUGCAUGGCCACNN | 516 |
| s | 171 | GCCAUGCAUGUGUUCAGAA | 237 | GCCAUGCAUGUGUUCAGAANN | 517 |
| as | 189 | UUCUGAACACAUGCAUGGC | 238 | UUCUGAACACAUGCAUGGCNN | 518 |
| s | 432 | UAUUCCACCACGGCUGUCA | 239 | UAUUCCACCACGGCUGUCANN | 519 |
| as | 449 | UGACAGCCGUGGUGGAAUA | 240 | UGACAGCCGUGGUGGAAUANN | 520 |
| s | 447 | GUCAUCACCAAUCCCAAGG | 241 | GUCAUCACCAAUCCCAAGGNN | 521 |
| as | 465 | CCUUGGGAUUGGUGAUGAC | 242 | CCUUGGGAUUGGUGAUGACNN | 522 |
| s | 115 | GUCCUCUGAUGGUCAAAGU | 243 | GUCCUCUGAUGGUCAAAGUNN | 523 |
| as | 133 | ACUUUGACCAUCAGAGGAC | 244 | ACUUUGACCAUCAGAGGACNN | 524 |
| s | 122 | GAUGGUCAAAGUUCUAGAU | 245 | GAUGGUCAAAGUUCUAGAUNN | 525 |
| as | 140 | AUCUAGAACUUUGACCAUC | 246 | AUCUAGAACUUUGACCAUCNN | 526 |
| s | 139 | AUGCUGUCCGAGGCAGUCC | 247 | AUGCUGUCCGAGGCAGUCCNN | 527 |
| as | 157 | GGACUGCCUCGGACAGCAU | 248 | GGACUGCCUCGGACAGCAUNN | 528 |
| s | 172 | CCGUGCAUGUGUUCAGAAA | 249 | CCGUGCAUGUGUUCAGAAANN | 529 |
| as | 190 | UUUCUGAACACAUGCACGG | 250 | UUUCUGAACACAUGCACGGNN | 530 |
| s | 238 | AGUCUGGAGAGCUGCAUGG | 251 | AGUCUGGAGAGCUGCAUGGNN | 531 |
| as | 256 | CCAUGCAGCUCUCCAGACU | 252 | CCAUGCAGCUCUCCAGACUNN | 532 |
| s | 252 | CAUGGGCUCACAACUGAGG | 253 | CAUGGGCUCACAACUGAGGNN | 533 |
| as | 270 | CCUCAGUUGUGAGCCCAUG | 254 | CCUCAGUUGUGAGCCCAUGNN | 534 |
| s | 33 | UCUCAUCGUCUGCUCCUCC | 255 | UCUCAUCGUCUGCUCCUCCNN | 535 |
| as | 51 | GGAGGAGCAGACGAUGAGA | 256 | GGAGGAGCAGACGAUGAGANN | 536 |
| s | 340 | CCCCAUUCCAUGAGCAUGC | 257 | CCCCAUUCCAUGAGCAUGCNN | 537 |
| as | 358 | GCAUGCUCAUGGAAUGGGG | 258 | GCAUGCUCAUGGAAUGGGGNN | 538 |
| s | 421 | GCCCCUACUCCUAUUCCAC | 259 | GCCCCUACUCCUAUUCCACNN | 539 |
| as | 439 | GUGGAAUAGGAGUAGGGGC | 260 | GUGGAAUAGGAGUAGGGGCNN | 540 |
| s | 431 | CUAUUCCACCACGGCUGUC | 261 | CUAUUCCACCACGGCUGUCNN | 541 |
| as | 449 | GACAGCCGUGGUGGAAUAG | 262 | GACAGCCGUGGUGGAAUAGNN | 542 |
| s | 440 | CACGGCUGUCGUCACCAAU | 263 | CACGGCUGUCGUCACCAAUNN | 543 |
| as | 458 | AUUGGUGACGACAGCCGUG | 264 | AUUGGUGACGACAGCCGUGNN | 544 |
| s | 496 | AGGACGAGGGAUGGGAUUU | 265 | AGGACGAGGGAUGGGAUUUNN | 545 |
| as | 514 | AAAUCCCAUCCCUCGUCCU | 266 | AAAUCCCAUCCCUCGUCCUNN | 546 |
| s | 556 | UCACCUCAUAUGCUAUGUU | 267 | UCACCUCAUAUGCUAUGUUNN | 547 |
| as | 574 | AACAUAGCAUAUGAGGUGA | 268 | AACADAGCAUAUGAGGUGANN | 548 |
| s | 559 | CCUCAUAUGCUAUGUUAGA | 269 | CCUCAUAUGCUAUGUUAGANN | 549 |
| as | 577 | UCUAACAUAGCAUAUGAGG | 270 | UCUAACAUAGCAUAUGAGGNN | 550 |
| s | 570 | AUGUUAGAAGUCCAGGCAG | 271 | AUGUUAGAAGUCCAGGCAGNN | 551 |
| as | 588 | CUGCCUGGACUUCUAACAU | 272 | CUGCCUGGACUUCUAACAUNN | 552 |
| s | 78 | UCUGAGGCUGGCCCUACGG | 273 | UCUGAGGCUGGCCCUACGGNN | 553 |
| as | 96 | CCGUAGGGCCAGCCUCAGA | 274 | CCGUAGGGCCAGCCUCAGANN | 554 |
| s | 87 | GGCCCUACGGGCACCGGUG | 275 | GGCCCUACGGGCACCGGUGNN | 555 |
| as | 105 | CACCGGUGCCCGUAGGGCC | 276 | CACCGGUGCCCGUAGGGCCNN | 556 |
| s | 95 | GGGCACCGGUGAAUCCAAG | 277 | GGGCACCGGUGAAUCCAAGNN | 557 |
| as | 113 | CUUGGAUUCACCGGUGCCC | 278 | CUUGGAUUCACCGGUGCCCNN | 558 |
| s | 167 | CCAUGCAUGUGUUCAGAAA | 279 | CCAUGCAUGUGUUCAGAAANN | 559 |
| as | 185 | UUUCUGAACACAUGCAUGG | 280 | UUUCUGAACACAUGCAUGGNN | 560 |

TABLE 3B
Sense and antisense strand
sequences of human TTR dsRNAs
Strand: s = sense; as = antisense;
Position: position of 5′ base on transcript
(NM_000371.2, SEQ ID NO: 1329)

| | | Sequence with | SEQ |
|---|---|---|---|
| | | 3′ deoxythimidine | ID |
| Strand | Position | overhang (5′ to 3′) | NO: |
| s | 100 | CCGGUGAAUCCAAGUGUCCdTdT | 561 |
| as | 118 | GGACACUUGGAUUCACCGGdTdT | 562 |
| s | 11 | ACUCAUUCUUGGCAGGAUGdTdT | 563 |
| as | 29 | CAUCCUGCCAAGAAUGAGUdTdT | 564 |
| s | 111 | AAGUGUCCUCUGAUGGUCAdTdT | 565 |
| as | 129 | UGACCAUCAGAGGACACUUdTdT | 566 |
| s | 13 | UCAUUCUUGGCAGGAUGGCdTdT | 567 |
| as | 31 | GCCAUCCUGCCAAGAAUGAdTdT | 568 |
| s | 130 | AAGUUCUAGAUGCUGUCCGdTdT | 569 |
| as | 148 | CGGACAGCAUCUAGAACUUdTdT | 570 |
| s | 132 | GUUCUAGAUGCUGUCCGAGdTdT | 571 |
| as | 150 | CUCGGACAGCAUCUAGAACdTdT | 572 |
| s | 135 | CUAGAUGCUGUCCGAGGCAdTdT | 573 |
| as | 153 | UGCCUCGGACAGCAUCUAGdTdT | 574 |
| s | 138 | GAUGCUGUCCGAGGCAGUCdTdT | 575 |
| as | 156 | GACUGCCUCGGACAGCAUCdTdT | 576 |
| s | 14 | CAUUCUUGGCAGGAUGGCUdTdT | 577 |
| as | 32 | AGCCAUCCUGCCAAGAAUGdTdT | 578 |
| s | 140 | UGCUGUCCGAGGCAGUCCUdTdT | 579 |
| as | 158 | AGGACUGCCUCGGACAGCAdTdT | 580 |
| s | 146 | CCGAGGCAGUCCUGCCAUCdTdT | 581 |
| as | 164 | GAUGGCAGGACUGCCUCGGdTdT | 582 |
| s | 152 | CAGUCCUGCCAUCAAUGUGdTdT | 583 |
| as | 170 | CACAUUGAUGGCAGGACUGdTdT | 584 |
| s | 164 | CAAUGUGGCCGUGCAUGUGdTdT | 585 |
| as | 182 | CACAUGCACGGCCACAUUGdTdT | 586 |
| s | 178 | AUGUGUUCAGAAAGGCUGCdTdT | 587 |
| as | 196 | GCAGCCUUUCUGAACACAUdTdT | 588 |
| s | 2 | CAGAAGUCCACUCAUUCUUdTdT | 589 |
| as | 20 | AAGAAUGAGUGGACUUCUGdTdT | 590 |
| s | 21 | GGCAGGAUGGCUUCUCAUCdTdT | 591 |
| as | 39 | GAUGAGAAGCCAUCCUGCCdTdT | 592 |
| s | 210 | GAGCCAUUUGCCUCUGGGAdTdT | 593 |
| as | 228 | UCCCAGAGGCAAAUGGCUCdTdT | 594 |
| s | 23 | CAGGAUGGCUUCUCAUCGUdTdT | 595 |
| as | 41 | ACGAUGAGAAGCCAUCCUGdTdT | 596 |
| s | 24 | AGGAUGGCUUCUCAUCGUCdTdT | 597 |
| as | 42 | GACGAUGAGAAGCCAUCCUdTdT | 598 |
| s | 245 | AGAGCUGCAUGGGCUCACAdTdT | 599 |
| as | 263 | UGUGAGCCCAUGCAGCUCUdTdT | 600 |
| s | 248 | GCUGCAUGGGCUCACAACUdTdT | 601 |
| as | 266 | AGUUGUGAGCCCAUGCAGCdTdT | 602 |
| s | 25 | GGAUGGCUUCUCAUCGUCUdTdT | 603 |
| as | 43 | AGACGAUGAGAAGCCAUCCdTdT | 604 |
| s | 251 | GCAUGGGCUCACAACUGAGdTdT | 605 |
| as | 269 | CUCAGUUGUGAGCCCAUGCdTdT | 606 |
| s | 253 | AUGGGCUCACAACUGAGGAdTdT | 607 |
| as | 271 | UCCUCAGUUGUGAGCCCAUdTdT | 608 |
| s | 254 | UGGGCUCACAACUGAGGAGdTdT | 609 |
| as | 272 | CUCCUCAGUUGUGAGCCCAdTdT | 610 |
| s | 270 | GAGGAAUUUGUAGAAGGGAdTdT | 611 |
| as | 288 | UCCCUUCUACAAAUUCCUCdTdT | 612 |
| s | 276 | UUUGUAGAAGGGAUAUACAdTdT | 613 |
| as | 294 | UGUAUAUCCCUUCUACAAAdTdT | 614 |
| s | 277 | UUGUAGAAGGGAUAUACAAdTdT | 615 |
| as | 295 | UUGUAUAUCCCUUCUACAAdTdT | 616 |
| s | 278 | UGUAGAAGGGAUAUACAAAdTdT | 617 |
| as | 296 | UUUGUAUAUCCCUUCUACAdTdT | 618 |
| s | 281 | AGAAGGGAUAUACAAAGUGdTdT | 619 |
| as | 299 | CACUUUGUAUAUCCCUUCUdTdT | 620 |
| s | 295 | AAGUGGAAAUAGACACCAAdTdT | 621 |
| as | 313 | UUGGUGUCUAUUUCCACUUdTdT | 622 |
| s | 299 | GGAAAUAGACACCAAAUCUdTdT | 623 |
| as | 317 | AGAUUUGGUGUCUAUUUCCdTdT | 624 |
| s | 300 | GAAAUAGACACCAAAUCUUdTdT | 625 |
| as | 318 | AAGAUUUGGUGUCUAUUUCdTdT | 626 |
| s | 303 | AUAGACACCAAAUCUUACUdTdT | 627 |
| as | 321 | AGUAAGAUUUGGUGUCUAUdTdT | 628 |
| s | 304 | UAGACACCAAAUCUUACUGdTdT | 629 |
| as | 322 | CAGUAAGAUUUGGUGUCUAdTdT | 630 |
| s | 305 | AGACACCAAAUCUUACUGGdTdT | 631 |
| as | 323 | CCAGUAAGAUUUGGUGUCUdTdT | 632 |
| s | 317 | UUACUGGAAGGCACUUGGCdTdT | 633 |
| as | 335 | GCCAAGUGCCUUCCAGUAAdTdT | 634 |
| s | 32 | UUCUCAUCGUCUGCUCCUCdTdT | 635 |
| as | 50 | GAGGAGCAGACGAUGAGAAdTdT | 636 |
| s | 322 | GGAAGGCACUUGGCAUCUCdTdT | 637 |
| as | 340 | GAGAUGCCAAGUGCCUUCCdTdT | 638 |
| s | 326 | GGCACUUGGCAUCUCCCCAdTdT | 639 |
| as | 344 | UGGGGAGAUGCCAAGUGCCdTdT | 640 |
| s | 333 | GGCAUCUCCCCAUUCCAUGdTdT | 641 |
| as | 351 | AUGGAAUGGGGAGAUGCCTTdTdT | 642 |
| s | 334 | GCAUCUCCCCAUUCCAUGAdTdT | 643 |
| as | 352 | UCAUGGAAUGGGGAGAUGCdTdT | 644 |
| s | 335 | CAUCUCCCCAUUCCAUGAGdTdT | 645 |
| as | 353 | CUCAUGGAAUGGGGAGAUGdTdT | 646 |
| s | 336 | AUCUCCCCAUUCCAUGAGCdTdT | 647 |
| as | 354 | GCUCAUGGAAUGGGGAGAUdTdT | 648 |
| s | 338 | CUCCCCAUUCCAUGAGCAUdTdT | 649 |
| as | 356 | AUGCUCAUGGAAUGGGGAGdTdT | 650 |
| s | 341 | CCCAUUCCAUGAGCAUGCAdTdT | 651 |
| as | 359 | UGCAUGCUCAUGGAAUGGGdTdT | 652 |
| s | 347 | CCAUGAGCAUGCAGAGGUGdTdT | 653 |
| as | 365 | CACCUCUGCAUGCUCAUGGdTdT | 654 |
| s | 352 | AGCAUGCAGAGGUGGUAUUdTdT | 655 |
| as | 370 | AAUACCACCUCUGCAUGCUdTdT | 656 |
| s | 354 | CAUGGAGAGGUGGUAUUCAdTdT | 657 |
| as | 372 | UGAAUACCACCUCUGCAUGdTdT | 658 |
| s | 355 | AUGCAGAGGUGGUAUUCACdTdT | 659 |
| as | 373 | GUGAAUACCACCUCUGCAUdTdT | 660 |
| s | 362 | GGUGGUAUUCACAGCCAACdTdT | 661 |
| as | 380 | GUUGGCUGUGAAUACCACCdTdT | 662 |
| s | 363 | GUGGUAUUCACAGCCAACGdTdT | 663 |
| as | 381 | CGUUGGCUGUGAAUACCACdTdT | 664 |
| s | 364 | UGGUAUUCACAGCCAACGAdTdT | 665 |
| as | 382 | UCGUUGGCUGUGAAUACCAdTdT | 666 |
| s | 365 | GGUAUUCACAGCCAACGACdTdT | 667 |
| as | 383 | GUCGUUGGCUGUGAAUACCdTdT | 668 |
| s | 366 | GUAUUCACAGCCAACGACUdTdT | 669 |
| as | 384 | AGUCGUUGGCUGUGAAUACdTdT | 670 |
| s | 367 | UAUUCACAGCCAACGACUCdTdT | 671 |
| as | 385 | GAGUCGUUGGCUGUGAAUAdTdT | 672 |
| s | 370 | UCACAGCCAACGACUCCGGdTdT | 673 |
| as | 388 | CCGGAGUCGUUGGCUGUGAdTdT | 674 |
| s | 390 | CCCCGCCGCUACACCAUUGdTdT | 675 |
| as | 408 | CAAUGGUGUAGCGGCGGGGdTdT | 676 |
| s | 4 | GAAGUCCACUCAUUCUUGGdTdT | 677 |
| as | 22 | CCAAGAAUGAGUGGACUUCdTdT | 678 |
| s | 412 | CCCUGCUGAGCCCCUACUCdTdT | 679 |
| as | 430 | GAGUAGGGGCUCAGCAGGGdTdT | 680 |
| s | 417 | CUGAGCCCCUACUCCUAUUdTdT | 681 |
| as | 435 | AAUAGGAGUAGGGGCUCAGdTdT | 682 |
| s | 418 | UGAGCCCCUACUCCUAUUCdTdT | 683 |
| as | 436 | GAAUAGGAGUAGGGGCUCAdTdT | 684 |
| s | 422 | CCCCUACUCCUAUUCCACCdTdT | 685 |
| as | 440 | GGUGGAAUAGGAGUAGGGGdTdT | 686 |
| s | 425 | CUACUCCUAUUCCACCACGdTdT | 687 |
| as | 443 | CGUGGUGGAAUAGGAGUAGdTdT | 688 |
| s | 426 | UACUCCUAUUCCACCACGGdTdT | 689 |
| as | 444 | CCGUGGUGGAAUAGGAGUAdTdT | 690 |
| s | 427 | ACUCCUAUUCCACCACGGCdTdT | 691 |
| as | 445 | GCCGUGGUGGAAUAGGAGUdTdT | 692 |
| s | 429 | UCCUAUUCCACCACGGCUGdTdT | 693 |
| as | 447 | CAGCCGUGGUGGAAUAGGAdTdT | 694 |
| s | 432 | UAUUCCACCACGGCUGUCGdTdT | 695 |
| as | 450 | CGACAGCCGUGGUGGAAUAdTdT | 696 |
| s | 433 | AUUCCACCACGGCUGUCGUdTdT | 697 |
| as | 451 | ACGACAGCCGUGGUGGAAUdTdT | 698 |
| s | 437 | CACCACGGCUGUCGUCACCdTdT | 699 |
| as | 455 | GGUGACGACAGCCGUGGUGdTdT | 700 |
| s | 438 | ACCACGGCUGUCGUCACCAdTdT | 701 |
| as | 456 | UGGUGACGACAGCCGUGGUdTdT | 702 |
| s | 439 | CCACGGCUGUCGUCACCAAdTdT | 703 |
| as | 457 | UUGGUGACGACAGCCGUGGdTdT | 704 |
| s | 441 | ACGGCUGUCGUCACCAAUCdTdT | 705 |
| as | 459 | GAUUGGUGACGACAGCCGUdTdT | 706 |
| s | 442 | CGGCUGUCGUCACCAAUCCdTdT | 707 |
| as | 460 | GGAUUGGUGACGACAGCCGdTdT | 708 |
| s | 449 | CGUCACCAAUCCCAAGGAAdTdT | 709 |
| as | 467 | UUCCUUGGGAUUGGUGACGdTdT | 710 |
| s | 455 | CAAUCCCAAGGAAUGAGGGdTdT | 711 |
| as | 473 | CCCUCAUUCCUUGGGAUUGdTdT | 712 |
| s | 491 | CCUGAAGGACGAGGGAUGGdTdT | 713 |
| as | 509 | CCAUCCCUCGUCCUUCAGGdTdT | 714 |
| s | 497 | GGACGAGGGAUGGGAUUUCdTdT | 715 |
| as | 515 | GAAAUCCCAUCCCUCGUCCdTdT | 716 |
| s | 5 | AAGUCCACUCAUUCUUGGCdTdT | 717 |
| as | 23 | GCCAAGAAUGAGUGGACUUdTdT | 718 |
| s | 508 | GGGAUUUCAUGUAACCAAGdTdT | 719 |
| as | 526 | CUUGGUUACAUGAAAUCCCdTdT | 720 |
| s | 509 | GGAUUUCAUGUAACCAAGAdTdT | 721 |
| as | 527 | UCUUGGUUACAUGAAAUCCdTdT | 722 |
| s | 514 | UCAUGUAACCAAGAGUAUUdTdT | 723 |
| as | 532 | AAUACUCUUGGUUACAUGAdTdT | 724 |
| s | 516 | AUGUAACCAAGAGUAUUCCdTdT | 725 |
| as | 534 | GGAAUACUCUUGGUUACAUdTdT | 726 |
| s | 517 | UGUAACCAAGAGUAUUCCAdTdT | 727 |
| as | 535 | UGGAAUACUCUUGGUUACAdTdT | 728 |
| s | 518 | GUAACCAAGAGUAUUCCAUdTdT | 729 |
| as | 536 | AUGGAAUACUCUUGGUUACdTdT | 730 |
| s | 54 | UGCCUUGCUGGACUGGUAUdTdT | 731 |
| as | 72 | AUACCAGUCCAGCAAGGCAdTdT | 732 |
| s | 543 | UAAAGCAGUGUUUUCACCUdTdT | 733 |
| as | 561 | AGGUGAAAACACUGCUUUAdTdT | 734 |
| s | 55 | GCCUUGCUGGACUGGUAUUdTdT | 735 |
| as | 73 | AAUACCAGUCCAGCAAGGCdTdT | 736 |
| s | 551 | UGUUUUCACCUCAUAUGCUdTdT | 737 |
| as | 569 | AGCAUAUGAGGUGAAAACAdTdT | 738 |
| s | 552 | GUUUUCACCUCAUAUGCUAdTdT | 739 |
| as | 570 | UAGCAUAUGAGGUGAAAACdTdT | 740 |
| s | 553 | UUUUCACCUCAUAUGCUAUdTdT | 741 |
| as | 571 | AUAGCAUAUGAGGUGAAAAdTdT | 742 |
| s | 555 | UUCACCUCAUAUGCUAUGUdTdT | 743 |
| as | 573 | ACAUAGCAUAUGAGGUGAAdTdT | 744 |
| s | 557 | CACCUCAUAUGCUAUGUUAdTdT | 745 |
| as | 575 | UAACAUAGCAUAUGAGGUGdTdT | 746 |
| s | 56 | CCUUGCUGGACUGGUAUUUdTdT | 747 |
| as | 74 | AAAUACCAGUCCAGCAAGGdTdT | 748 |
| s | 563 | AUAUGCUAUGUUAGAAGUCdTdT | 749 |
| as | 581 | GACUUCUAACAUAGCAUAUdTdT | 750 |
| s | 564 | UAUGCUAUGUUAGAAGUCCdTdT | 751 |
| as | 582 | GGACUUCUAACAUAGCAUAdTdT | 752 |
| s | 566 | UGCUAUGUUAGAAGUCCAGdTdT | 753 |
| as | 584 | CUGGACUUCUAACAUAGCAdTdT | 754 |
| s | 57 | CUUGCUGGACUGGUAUUUGdTdT | 755 |
| as | 75 | CAAAUACCAGUCCAGCAAGdTdT | 756 |
| s | 578 | AGUCCAGGCAGAGACAAUAdTdT | 757 |
| as | 596 | AUUGUCUCUGCCUGGACUTTdTdT | 758 |
| s | 580 | UCCAGGCAGAGACAAUAAAdTdT | 759 |
| as | 598 | UUUAUUGUCUCUGCCUGGAdTdT | 760 |
| s | 607 | GUGAAAGGCACUUUUCAUUdTdT | 761 |
| as | 625 | AAUGAAAAGUGCCUUUCACdTdT | 762 |
| s | 62 | UGGACUGGUAUUUGUGUCUdTdT | 763 |
| as | 80 | AGACACAAAUACCAGUCCAdTdT | 764 |
| s | 77 | GUCUGAGGCUGGCCCUACGdTdT | 765 |
| as | 95 | CGUAGGGCCAGCCUCAGACdTdT | 766 |
| s | 79 | CUGAGGCUGGCCCUACGGGdTdT | 767 |
| as | 97 | CCCGUAGGGCCAGCCUCAGdTdT | 768 |
| s | 81 | GAGGCUGGCCCUACGGGCAdTdT | 769 |
| as | 99 | UGCCCGUAGGGCCAGCCUCdTdT | 770 |
| s | 82 | AGGCUGGCCCUACGGGCACdTdT | 771 |
| as | 100 | GUGCCCGUAGGGCCAGCCUdTdT | 772 |
| s | 84 | GCUGGCCCUACGGGCACCGdTdT | 773 |
| as | 102 | CGGUGCCCGUAGGGCCAGCdTdT | 774 |
| s | 85 | CUGGCCCUACGGGCACCGGdTdT | 775 |
| as | 103 | CCGGUGCCCGUAGGGCCAGdTdT | 776 |
| s | 87 | GGCCCUACGGGCACCGGUGdTdT | 777 |
| as | 105 | CACCGGUGCCCGUAGGGCCdTdT | 778 |
| s | 9 | CCACUCAUUCUUGGCAGGAdTdT | 779 |
| as | 27 | UCCUGCCAAGAAUGAGUGGdTdT | 780 |
| s | 90 | CCUACGGGCACCGGUGAAUdTdT | 781 |
| as | 108 | AUUCACCGGUGCCCGUAGGdTdT | 782 |
| s | 91 | CUACGGGCACCGGUGAAUCdTdT | 783 |
| as | 109 | GAUUCACCGGUGCCCGUAGdTdT | 784 |
| s | 92 | UACGGGCACCGGUGAAUCCdTdT | 785 |
| as | 110 | GGAUUCACCGGUGCCCGUAdTdT | 786 |
| s | 93 | ACGGGCACCGGUGAAUCCAdTdT | 787 |
| as | 111 | UGGAUUCACCGGUGCCCGUdTdT | 788 |
| s | 97 | GCACCGGUGAAUCCAAGUGdTdT | 789 |
| as | 115 | CACUUGGAUUCACCGGUGCdTdT | 790 |
| s | 98 | CACCGGUGAAUCCAAGUGUdTdT | 791 |
| as | 116 | ACACUUGGAUUCACCGGUGdTdT | 792 |
| s | 167 | UGUGGCCAUGCAUGUGUUCdTdT | 793 |
| as | 185 | GAACACAUGCAUGGCCACAdTdT | 794 |
| s | 168 | GUGGCCAUGCAUGUGUUCAdTdT | 795 |
| as | 186 | UGAACACAUGCAUGGCCACdTdT | 796 |
| s | 171 | GCCAUGCAUGUGUUCAGAAdTdT | 797 |
| as | 189 | UUCUGAACACAUGCAUGGCdTdT | 798 |
| s | 432 | UAUUCCACCACGGCUGUCAdTdT | 799 |
| as | 449 | UGACAGCCGUGGUGGAAUAdTdT | 800 |
| s | 447 | GUCAUCACCAAUCCCAAGGdTdT | 801 |
| as | 465 | CCUUGGGAUUGGUGAUGACdTdT | 802 |
| s | 115 | GUCCUCUGAUGGUCAAAGUdTdT | 803 |
| as | 133 | ACUUUGACCAUCAGAGGACdTdT | 804 |
| s | 122 | GAUGGUCAAAGUUCUAGAUdTdT | 805 |
| as | 140 | AUCUAGAACUUUGACCAUCdTdT | 806 |
| s | 139 | AUGCUGUCCGAGGCAGUCCdTdT | 807 |
| as | 157 | GGACUGCCUCGGACAGCAUdTdT | 808 |
| s | 172 | CCGUGCAUGUGUUCAGAAAdTdT | 809 |
| as | 190 | UUUCUGAACACAUGCACGGdTdT | 810 |
| s | 238 | AGUCUGGAGAGCUGCAUGGdTdT | 811 |
| as | 256 | CCAUGCAGCUCUCCAGACUdTdT | 812 |
| s | 252 | CAUGGGCUCACAACUGAGGdTdT | 813 |
| as | 270 | CCUCAGUUGUGAGCCCAUGdTdT | 814 |
| s | 33 | UCUCAUCGUCUGCUCCUCCdTdT | 815 |
| as | 51 | GGAGGAGCAGACGAUGAGAdTdT | 816 |
| s | 340 | CCCCAUUCCAUGAGCAUGCdTdT | 817 |
| as | 358 | GCAUGCUCAUGGAAUGGGGdTdT | 818 |
| s | 421 | GCCCCUACUCCUAUUCCACdTdT | 819 |
| as | 439 | GUGGAAUAGGAGUAGGGGCdTdT | 820 |
| s | 431 | CUAUUCCACCACGGCUGUCdTdT | 821 |
| as | 449 | GACAGCCGUGGUGGAAUAGdTdT | 822 |
| s | 440 | CACGGCUGUCGUCACCAAUdTdT | 823 |
| as | 458 | AUUGGUGACGACAGCCGUGdTdT | 824 |
| s | 496 | AGGACGAGGGAUGGGAUUUdTdT | 825 |
| as | 514 | AAAUCCCAUCCCUCGUCCUdTdT | 826 |
| s | 556 | UCACCUCAUAUGCUAUGUUdTdT | 827 |
| as | 574 | AACAUAGCAUAUGAGGUGAdTdT | 828 |
| s | 559 | CCUCAUAUGCUAUGUUAGAdTdT | 829 |
| as | 577 | UCUAACAUAGCAUAUGAGGdTdT | 830 |
| s | 570 | AUGUUAGAAGUCCAGGCAGdTdT | 831 |
| as | 588 | CUGCCUGGACUUCUAACAUdTdT | 832 |
| s | 78 | UCUGAGGCUGGCCCUACGGdTdT | 833 |
| as | 96 | CCGUAGGGCCAGCCUCAGAdTdT | 834 |
| s | 87 | GGCCCUACGGGCACCGGUGdTdT | 835 |
| as | 105 | CACCGGUGCCCGUAGGGCCdTdT | 836 |
| s | 95 | GGGCACCGGUGAAUCCAAGdTdT | 837 |
| as | 113 | CUUGGAUUCACCGGUGCCCdTdT | 838 |
| s | 167 | CCAUGCAUGUGUUCAGAAAdTdT | 839 |
| as | 185 | UUUCUGAACACAUGCAUGGdTdT | 840 |

TABLE 4
Chemically modified sense and antisense
strand sequences of human TTR dsRNAs
See Table 2 for duplex #. Strand: s = sense;
as = antisense; Position: position of 5′ base on
transcript (NM_000371.2, SEQ ID NO: 1329)

| | | | | SEQ |
|---|---|---|---|---|
| | | Po- | Sequence | ID |
| Strand | Oligo # | sition | (5′ to 3′) | NO: |
| s | A-32153 | 100 | ccGGuGAAuccAAGuGuccdTdT | 841 |
| as | A-32154 | 118 | GGAcACUUGGAUUcACCGGdTdT | 842 |
| s | A-32155 | 11 | AcucAuucuuGGcAGGAuGdTdT | 843 |
| as | A-32156 | 29 | cAUCCUGCcAAGAAUGAGUdTdT | 844 |
| s | A-32157 | 111 | AAGuGuccucuGAuGGucAdTdT | 845 |
| as | A-32158 | 129 | UGACcAUcAGAGGAcACUUdTdT | 846 |
| s | A-32163 | 13 | ucAuucuuGGcAGGAuGGcdTdT | 847 |
| as | A-32164 | 31 | GCcAUCCUGCcAAGAAUGAdTdT | 848 |
| s | A-32165 | 130 | AAGuucuAGAuGcuGuccGdTdT | 849 |
| as | A-32166 | 148 | CGGAcAGcAUCuAGAACUUdTdT | 850 |
| s | A-32167 | 132 | GuucuAGAuGcuGuccGAGdTdT | 851 |
| as | A-32168 | 150 | CUCGGAcAGcAUCuAGAACdTdT | 852 |
| s | A-32169 | 135 | cuAGAuGcuGuccGAGGcAdTdT | 853 |
| as | A-32170 | 153 | UGCCUCGGAcAGcAUCuAGdTdT | 854 |
| s | A-32171 | 138 | GAuGcuGuccGAGGcAGucdTdT | 855 |
| as | A-32172 | 156 | GACUGCCUCGGAcAGcAUCdTdT | 856 |
| s | A-32175 | 14 | cAuucuuGGcAGGAuGGcudTdT | 857 |
| as | A-32176 | 32 | AGCcAUCCUGCcAAGAAUGdTdT | 858 |
| s | A-32177 | 140 | uGcuGuccGAGGcAGuccudTdT | 859 |
| as | A-32178 | 158 | AGGACUGCCUCGGAcAGcAdTdT | 860 |
| s | A-32179 | 146 | ccGAGGcAGuccuGccAucdTdT | 861 |
| as | A-32180 | 164 | GAUGGcAGGACUGCCUCGGdTdT | 862 |
| s | A-32181 | 152 | cAGuccuGccAucAAuGuGdTdT | 863 |
| as | A-32182 | 170 | cAcAUUGAUGGcAGGACUGdTdT | 864 |
| s | A-32183 | 164 | cAAuGuGGccGuGcAuGuGdTdT | 865 |
| as | A-32184 | 182 | cAcAUGcACGGCcAcAUUGdTdT | 866 |
| s | A-32187 | 178 | AuGuGuucAGAAAGGcuGcdTdT | 867 |
| as | A-32188 | 196 | GcAGCCUUUCUGAAcAcAUdTdT | 868 |
| s | A-32189 | 2 | cAGAAGuccAcucAuucuudTdT | 869 |
| as | A-32190 | 20 | AAGAAUGAGUGGACUUCUGdTdT | 870 |
| s | A-32191 | 21 | GGcAGGAuGGcuucucAucdTdT | 871 |
| as | A-32192 | 39 | GAUGAGAAGCcAUCCUGCCdTdT | 872 |
| s | A-32193 | 210 | GAGccAuuuGccucuGGGAdTdT | 873 |
| as | A-32194 | 228 | UCCcAGAGGcAAAUGGCUCdTdT | 874 |
| s | A-32195 | 23 | cAGGAuGGcuucucAucGudTdT | 875 |
| as | A-32196 | 41 | ACGAUGAGAAGCcAUCCUGdTdT | 876 |
| s | A-32199 | 24 | AGGAuGGcuucucAucGucdTdT | 877 |
| as | A-32200 | 42 | GACGAUGAGAAGCcAUCCUdTdT | 878 |
| s | A-32201 | 245 | AGAGcuGcAuGGGcucAcAdTdT | 879 |
| as | A-32202 | 263 | UGUGAGCCcAUGcAGCUCUdTdT | 880 |
| s | A-32203 | 248 | GcuGcAuGGGcucAcAAcudTdT | 881 |
| as | A-32204 | 266 | AGUUGUGAGCCcAUGcAGCdTdT | 882 |
| s | A-32205 | 25 | GGAuGGcuucucAucGucudTdT | 883 |
| as | A-32206 | 43 | AGACGAUGAGAAGCcAUCCdTdT | 884 |
| s | A-32207 | 251 | GcAuGGGcucAcAAcuGAGdTdT | 885 |
| as | A-32208 | 269 | CUcAGUUGUGAGCCcAUGCdTdT | 886 |
| s | A-32211 | 253 | AuGGGcucAcAAcuGAGGAdTdT | 887 |
| as | A-32212 | 271 | UCCUcAGUUGUGAGCCcAUdTdT | 888 |
| s | A-32213 | 254 | uGGGcucAcAAcuGAGGAGdTdT | 889 |
| as | A-32214 | 272 | CUCCUcAGUUGUGAGCCcAdTdT | 890 |
| s | A-32215 | 270 | GAGGAAuuuGuAGAAGGGAdTdT | 891 |
| as | A-32216 | 288 | UCCCUUCuAcAAAUUCCUCdTdT | 892 |
| s | A-32217 | 276 | uuuGuAGAAGGGAuAuAcAdTdT | 893 |
| as | A-32218 | 294 | UGuAuAUCCCUUCuAcAAAdTdT | 894 |
| s | A-32219 | 277 | uuGuAGAAGGGAuAuAcAAdTdT | 895 |
| as | A-32220 | 295 | UUGuAuAUCCCUUCuAcAAdTdT | 896 |
| s | A-32221 | 278 | uGuAGAAGGGAuAuAcAAAdTdT | 897 |
| as | A-32222 | 296 | UUUGuAuAUCCCUUCuAcAdTdT | 898 |
| s | A-32223 | 281 | AGAAGGGAuAuAcAAAGuGdTdT | 899 |
| as | A-32224 | 299 | cACUUUGuAuAUCCCUUCUdTdT | 900 |
| s | A-32225 | 295 | AAGuGGAAAuAGAcAccAAdTdT | 901 |
| as | A-32226 | 313 | UUGGUGUCuAUUUCcACUUdTdT | 902 |
| s | A-32227 | 299 | GGAAAuAGAcAccAAAucudTdT | 903 |
| as | A-32228 | 317 | AGAUUUGGUGUCuAUUUCCdTdT | 904 |
| s | A-32229 | 300 | GAAAuAGAcAccAAAucuudTdT | 905 |
| as | A-32230 | 318 | AAGAUUUGGUGUCuAUUUCdTdT | 906 |
| s | A-32231 | 303 | AuAGAcAccAAAucuuAcudTdT | 907 |
| as | A-32232 | 321 | AGuAAGAUUUGGUGUCuAUdTdT | 908 |
| s | A-32233 | 304 | uAGAcAccAAAucuuAcuGdTdT | 909 |
| as | A-32234 | 322 | cAGuAAGAUUUGGUGUCuAdTdT | 910 |
| s | A-32235 | 305 | AGAcAccAAAucuuAcuGGdTdT | 911 |
| as | A-32236 | 323 | CcAGuAAGAUUUGGUGUCUdTdT | 912 |
| s | A-32237 | 317 | uuAcuGGAAGGcAcuuGGcdTdT | 913 |
| as | A-32238 | 335 | GCcAAGUGCCUUCcAGuAAdTdT | 914 |
| s | A-32239 | 32 | uucucAucGucuGcuccucdTdT | 915 |
| as | A-32240 | 50 | GAGGAGcAGACGAUGAGAAdTdT | 916 |
| s | A-32241 | 322 | GGAAGGcAcuuGGcAucucdTdT | 917 |
| as | A-32242 | 340 | GAGAUGCcAAGUGCCUUCCdTdT | 918 |
| s | A-32243 | 326 | GGcAcuuGGcAucuccccAdTdT | 919 |
| as | A-32244 | 344 | UGGGGAGAUGCcAAGUGCCdTdT | 920 |
| s | A-32247 | 333 | GGcAucuccccAuuccAuGdTdT | 921 |
| as | A-32248 | 351 | cAUGGAAUGGGGAGAUGCCdTdT | 922 |
| s | A-32249 | 334 | GcAucuccccAuuccAuGAdTdT | 923 |
| as | A-32250 | 352 | UcAUGGAAUGGGGAGAUGCdTdT | 924 |
| s | A-32251 | 335 | cAucuccccAuuccAuGAGdTdT | 925 |
| as | A-32252 | 353 | CUcAUGGAAUGGGGAGAUGdTdT | 926 |
| s | A-32253 | 336 | AucuccccAuuccAuGAGcdTdT | 927 |
| as | A-32254 | 354 | GCUcAUGGAAUGGGGAGAUdTdT | 928 |
| s | A-32255 | 338 | cuccccAuuccAuGAGcAudTdT | 929 |
| as | A-32256 | 356 | AUGCUcAUGGAAUGGGGAGdTdT | 930 |
| s | A-32259 | 341 | cccAuuccAuGAGcAuGcAdTdT | 931 |
| as | A-32260 | 359 | UGcAUGCUcAUGGAAUGGGdTdT | 932 |
| s | A-32261 | 347 | ccAuGAGcAuGcAGAGGuGdTdT | 933 |
| as | A-32262 | 365 | cACCUCUGcAUGCUcAUGGdTdT | 934 |
| s | A-32263 | 352 | AGcAuGcAGAGGuGGuAuudTdT | 935 |
| as | A-32264 | 370 | AAuACcACCUCUGcAUGCUdTdT | 936 |
| s | A-32265 | 354 | cAuGcAGAGGuGGuAuucAdTdT | 937 |
| as | A-32266 | 372 | UGAAuACcACCUCUGcAUGdTdT | 938 |
| s | A-32267 | 355 | AuGcAGAGGuGGuAuucAcdTdT | 939 |
| as | A-32268 | 373 | GUGAAuACcACCUCUGcAUdTdT | 940 |
| s | A-32269 | 362 | GGuGGuAuucAcAGccAAcdTdT | 941 |
| as | A-32270 | 380 | GUUGGCUGUGAAuACcACCdTdT | 942 |
| s | A-32271 | 363 | GuGGuAuucAcAGccAAcGdTdT | 943 |
| as | A-32272 | 381 | CGUUGGCUGUGAAuACcACdTdT | 944 |
| s | A-32273 | 364 | uGGuAuucAcAGccAAcGAdTdT | 945 |
| as | A-32274 | 382 | UCGUUGGCUGUGAAuACcAdTdT | 946 |
| s | A-32275 | 365 | GGuAuucAcAGccAAcGAcdTdT | 947 |
| as | A-32276 | 383 | GUCGUUGGCUGUGAAuACCdTdT | 948 |
| s | A-32277 | 366 | GuAuucAcAGccAAcGAcudTdT | 949 |
| as | A-32278 | 384 | AGUCGUUGGCUGUGAAuACdTdT | 950 |
| s | A-32279 | 367 | uAuucAcAGccAAcGAcucdTdT | 951 |
| as | A-32280 | 385 | GAGUCGUUGGCUGUGAAuAdTdT | 952 |
| s | A-32281 | 370 | ucAcAGccAAcGAcuccGGdTdT | 953 |
| as | A-32282 | 388 | CCGGAGUCGUUGGCUGUGAdTdT | 954 |
| s | A-32283 | 390 | ccccGccGcuAcAccAuuGdTdT | 955 |
| as | A-32284 | 408 | cAAUGGUGuAGCGGCGGGGdTdT | 956 |
| s | A-32285 | 4 | GAAGuccAcucAuucuuGGdTdT | 957 |
| as | A-32286 | 22 | CcAAGAAUGAGUGGACUUCdTdT | 958 |
| s | A-32287 | 412 | cccuGcuGAGccccuAcucdTdT | 959 |
| as | A-32288 | 430 | GAGuAGGGGCUcAGcAGGGdTdT | 960 |
| s | A-32289 | 417 | cuGAGccccuAcuccuAuudTdT | 961 |
| as | A-32290 | 435 | AAuAGGAGuAGGGGCUcAGdTdT | 962 |
| s | A-32291 | 418 | uGAGccccuAcuccuAuucdTdT | 963 |
| as | A-32292 | 436 | GAAuAGGAGuAGGGGCUcAdTdT | 964 |
| s | A-32295 | 422 | ccccuAcuccuAuuccAccdTdT | 965 |
| as | A-32296 | 440 | GGUGGAAuAGGAGuAGGGGdTdT | 966 |
| s | A-32297 | 425 | cuAcuccuAuuccAccAcGdTdT | 967 |
| as | A-32298 | 443 | CGUGGUGGAAuAGGAGuAGdTdT | 968 |
| s | A-32299 | 426 | uAcuccuAuuccAccAcGGdTdT | 969 |
| as | A-32300 | 444 | CCGUGGUGGAAuAGGAGuAdTdT | 970 |
| s | A-32301 | 427 | AcuccuAuuccAccAcGGcdTdT | 971 |
| as | A-32302 | 445 | GCCGUGGUGGAAuAGGAGUdTdT | 972 |
| s | A-32303 | 429 | uccuAuuccAccAcGGcuGdTdT | 973 |
| as | A-32304 | 447 | cAGCCGUGGUGGAAuAGGAdTdT | 974 |
| s | A-32307 | 432 | uAuuccAccAcGGcuGucGdTdT | 975 |
| as | A-32308 | 450 | CGAcAGCCGUGGUGGAAuAdTdT | 976 |
| s | A-32309 | 433 | AuuccAccAcGGcuGucGudTdT | 977 |
| as | A-32310 | 451 | ACGAcAGCCGUGGUGGAAUdTdT | 978 |
| s | A-32311 | 437 | cAccAcGGcuGucGucAccdTdT | 979 |
| as | A-32312 | 455 | GGUGACGAcAGCCGUGGUGdTdT | 980 |
| s | A-32313 | 438 | AccAcGGcuGucGucAccAdTdT | 981 |
| as | A-32314 | 456 | UGGUGACGAcAGCCGUGGUdTdT | 982 |
| s | A-32315 | 439 | ccAcGGcuGucGucAccAAdTdT | 983 |
| as | A-32316 | 457 | UUGGUGACGAcAGCCGUGGdTdT | 984 |
| s | A-32319 | 441 | AcGGcuGucGucAccAAucdTdT | 985 |
| as | A-32320 | 459 | GAUUGGUGACGAcAGCCGUdTdT | 986 |
| s | A-32321 | 442 | cGGcuGucGucAccAAuccdTdT | 987 |
| as | A-32322 | 460 | GGAUUGGUGACGAcAGCCGdTdT | 988 |
| s | A-32323 | 449 | cGucAccAAucccAAGGAAdTdT | 989 |
| as | A-32324 | 467 | UUCCUUGGGAUUGGUGACGdTdT | 990 |
| s | A-32325 | 455 | cAAucccAAGGAAuGAGGGdTdT | 991 |
| as | A-32326 | 473 | CCCUcAUUCCUUGGGAUUGdTdT | 992 |
| s | A-32327 | 491 | ccuGAAGGAcGAGGGAuGGdTdT | 993 |
| as | A-32328 | 509 | CcAUCCCUCGUCCUUcAGGdTdT | 994 |
| s | A-32331 | 497 | GGAcGAGGGAuGGGAuuucdTdT | 995 |
| as | A-32332 | 515 | GAAAUCCcAUCCCUCGUCCdTdT | 996 |
| s | A-32333 | 5 | AAGuccAcucAuucuuGGcdTdT | 997 |
| as | A-32334 | 23 | GCcAAGAAUGAGUGGACUUdTdT | 998 |
| s | A-32335 | 508 | GGGAuuucAuGuAAccAAGdTdT | 999 |
| as | A-32336 | 526 | CUUGGUuAcAUGAAAUCCCdTdT | 1000 |
| s | A-32337 | 509 | GGAuuucAuGuAAccAAGAdTdT | 1001 |
| as | A-32338 | 527 | UCUUGGUuAcAUGAAAUCCdTdT | 1002 |
| s | A-32339 | 514 | ucAuGuAAccAAGAGuAuudTdT | 1003 |
| as | A-32340 | 532 | AAuACUCUUGGUuAcAUGAdTdT | 1004 |
| s | A-32341 | 516 | AuGuAAccAAGAGuAuuccdTdT | 1005 |
| as | A-32342 | 534 | GGAAuACUCUUGGUuAcAUdTdT | 1006 |
| s | A-32343 | 517 | uGuAAccAAGAGuAuuccAdTdT | 1007 |
| as | A-32344 | 535 | UGGAAuACUCUUGGUuAcAdTdT | 1008 |
| s | A-32345 | 518 | GuAAccAAGAGuAuuccAudTdT | 1009 |
| as | A-32346 | 536 | AUGGAAuACUCUUGGUuACdTdT | 1010 |
| s | A-32347 | 54 | uGccuuGcuGGAcuGGuAudTdT | 1011 |
| as | A-32348 | 72 | AuACcAGUCcAGcAAGGcAdTdT | 1012 |
| s | A-32349 | 543 | uAAAGcAGuGuuuucAccudTdT | 1013 |
| as | A-32350 | 561 | AGGUGAAAAcACUGCUUuAdTdT | 1014 |
| s | A-32351 | 55 | GccuuGcuGGAcuGGuAuudTdT | 1015 |
| as | A-32352 | 73 | AAuACcAGUCcAGcAAGGCdTdT | 1016 |
| s | A-32353 | 551 | uGuuuucAccucAuAuGcudTdT | 1017 |
| as | A-32354 | 569 | AGcAuAUGAGGUGAAAAcAdTdT | 1018 |
| s | A-32355 | 552 | GuuuucAccucAuAuGcuAdTdT | 1019 |
| as | A-32356 | 570 | uAGcAuAUGAGGUGAAAACdTdT | 1020 |
| s | A-32357 | 553 | uuuucAccucAuAuGcuAudTdT | 1021 |
| as | A-32358 | 571 | AuAGcAuAUGAGGUGAAAAdTdT | 1022 |
| s | A-32359 | 555 | uucAccucAuAuGcuAuGudTdT | 1023 |
| as | A-32360 | 573 | AcAuAGcAuAUGAGGUGAAdTdT | 1024 |
| s | A-32363 | 557 | cAccucAuAuGcuAuGuuAdTdT | 1025 |
| as | A-32364 | 575 | uAAcAuAGcAuAUGAGGUGdTdT | 1026 |
| s | A-32367 | 56 | ccuuGcuGGAcuGGuAuuudTdT | 1027 |
| as | A-32368 | 74 | AAAuACcAGUCcAGcAAGGdTdT | 1028 |
| s | A-32369 | 563 | AuAuGcuAuGuuAGAAGucdTdT | 1029 |
| as | A-32370 | 581 | GACUUCuAAcAuAGcAuAUdTdT | 1030 |
| s | A-32371 | 564 | uAuGcuAuGuuAGAAGuccdTdT | 1031 |
| as | A-32372 | 582 | GGACUUCuAAcAuAGcAuAdTdT | 1032 |
| s | A-32373 | 566 | uGcuAuGuuAGAAGuccAGdTdT | 1033 |
| as | A-32374 | 584 | CUGGACUUCuAAcAuAGcAdTdT | 1034 |
| s | A-32375 | 57 | cuuGcuGGAcuGGuAuuuGdTdT | 1035 |
| as | A-32376 | 75 | cAAAuACcAGUCcAGcAAGdTdT | 1036 |
| s | A-32379 | 578 | AGuccAGGcAGAGAcAAuAdTdT | 1037 |
| as | A-32380 | 596 | uAUUGUCUCUGCCUGGACUdTdT | 1038 |
| s | A-32381 | 580 | uccAGGcAGAGAcAAuAAAdTdT | 1039 |
| as | A-32382 | 598 | UUuAUUGUCUCUGCCUGGAdTdT | 1040 |
| s | A-32383 | 607 | GuGAAAGGcAcuuuucAuudTdT | 1041 |
| as | A-32384 | 625 | AAUGAAAAGUGCCUUUcACdTdT | 1042 |
| s | A-32385 | 62 | uGGAcuGGuAuuuGuGucudTdT | 1043 |
| as | A-32386 | 80 | AGAcAcAAAuACcAGUCcAdTdT | 1044 |
| s | A-32387 | 77 | GucuGAGGcuGGcccuAcGdTdT | 1045 |
| as | A-32388 | 95 | CGuAGGGCcAGCCUcAGACdTdT | 1046 |
| s | A-32391 | 79 | cuGAGGcuGGcccuAcGGGdTdT | 1047 |
| as | A-32392 | 97 | CCCGuAGGGCcAGCCUcAGdTdT | 1048 |
| s | A-32393 | 81 | GAGGcuGGcccuAcGGGcAdTdT | 1049 |
| as | A-32394 | 99 | UGCCCGuAGGGCcAGCCUCdTdT | 1050 |
| s | A-32395 | 82 | AGGcuGGcccuAcGGGcAcdTdT | 1051 |
| as | A-32396 | 100 | GUGCCCGuAGGGCcAGCCUdTdT | 1052 |
| s | A-32397 | 84 | GcuGGcccuAcGGGcAccGdTdT | 1053 |
| as | A-32398 | 102 | CGGUGCCCGuAGGGCcAGCdTdT | 1054 |
| s | A-32399 | 85 | cuGGcccuAcGGGcAccGGdTdT | 1055 |
| as | A-32400 | 103 | CCGGUGCCCGuAGGGCcAGdTdT | 1056 |
| s | A-32401 | 87 | GGcccuAcGGGcAccGGuGdTdT | 1057 |
| as | A-32402 | 105 | cACCGGUGCCCGuAGGGCCdTdT | 1058 |
| s | A-32403 | 9 | ccAcucAuucuuGGcAGGAdTdT | 1059 |
| as | A-32404 | 27 | UCCUGCcAAGAAUGAGUGGdTdT | 1060 |
| s | A-32405 | 90 | ccuAcGGGcAccGGuGAAudTdT | 1061 |
| as | A-32406 | 108 | AUUcACCGGUGCCCGuAGGdTdT | 1062 |
| s | A-32407 | 91 | cuAcGGGcAccGGuGAAucdTdT | 1063 |
| as | A-32408 | 109 | GAUUcACCGGUGCCCGuAGdTdT | 1064 |
| s | A-32409 | 92 | uAcGGGcAccGGuGAAuccdTdT | 1065 |
| as | A-32410 | 110 | GGAUUcACCGGUGCCCGuAdTdT | 1066 |
| s | A-32411 | 93 | AcGGGcAccGGuGAAuccAdTdT | 1067 |
| as | A-32412 | 111 | UGGAUUcACCGGUGCCCGUdTdT | 1068 |
| s | A-32415 | 97 | GcAccGGuGAAuccAAGuGdTdT | 1069 |
| as | A-32416 | 115 | cACUUGGAUUcACCGGUGCdTdT | 1070 |
| s | A-32417 | 98 | cAccGGuGAAuccAAGuGudTdT | 1071 |
| as | A-32418 | 116 | AcACUUGGAUUcACCGGUGdTdT | 1072 |
| s | A-32419 | 167 | uGuGGccAuGcAuGuGuucdTdT | 1073 |
| as | A-32420 | 185 | GAAcAcAUGcAUGGCcAcAdTdT | 1074 |
| s | A-32421 | 168 | GuGGccAuGcAuGuGuucAdTdT | 1075 |
| as | A-32422 | 186 | UGAAcAcAUGcAUGGCcACdTdT | 1076 |
| s | A-32423 | 171 | GccAuGcAuGuGuucAGAAdTdT | 1077 |
| as | A-32424 | 189 | UUCUGAAcAcAUGcAUGGCdTdT | 1078 |
| s | A-32427 | 432 | uAuuccAccAcGGcuGucAdTdT | 1079 |
| as | A-32428 | 449 | UGAcAGCCGUGGUGGAAuAdTdT | 1080 |
| s | A-32429 | 447 | GucAucAccAAucccAAGGdTdT | 1081 |
| as | A-32430 | 465 | CCUUGGGAUUGGUGAUGACdTdT | 1082 |
| s | A-32159 | 115 | GuccucuGAuGGucAAAGudTdT | 1083 |
| as | A-32160 | 133 | ACUUUGACcAUcAGAGGACdTdT | 1084 |
| s | A-32161 | 122 | GAuGGucAAAGuucuAGAudTdT | 1085 |
| as | A-32162 | 140 | AUCuAGAACUUUGACcAUCdTdT | 1086 |
| s | A-32173 | 139 | AuGcuGuccGAGGcAGuccdTdT | 1087 |
| as | A-32174 | 157 | GGACUGCCUCGGAcAGcAUdTdT | 1088 |
| s | A-32185 | 172 | ccGuGcAuGuGuucAGAAAdTdT | 1089 |
| as | A-32186 | 190 | UUUCUGAAcAcAUGcACGGdTdT | 1090 |
| s | A-32197 | 238 | AGucuGGAGAGcuGcAuGGdTdT | 1091 |
| as | A-32198 | 256 | CcAUGcAGCUCUCcAGACUdTdT | 1092 |
| s | A-32209 | 252 | cAuGGGcucAcAAcuGAGGdTdT | 1093 |
| as | A-32210 | 270 | CCUcAGUUGUGAGCCcAUGdTdT | 1094 |
| s | A-32245 | 33 | ucucAucGucuGcuccuccdTdT | 1095 |
| as | A-32246 | 51 | GGAGGAGcAGACGAUGAGAdTdT | 1096 |
| s | A-32257 | 340 | ccccAuuccAuGAGcAuGcdTdT | 1097 |
| as | A-32258 | 358 | GcAUGCUcAUGGAAUGGGGdTdT | 1098 |
| s | A-32293 | 421 | GccccuAcuccuAuuccAcdTdT | 1099 |
| as | A-32294 | 439 | GUGGAAuAGGAGuAGGGGCdTdT | 1100 |
| s | A-32305 | 431 | cuAuuccAccAcGGcuGucdTdT | 1101 |
| as | A-32306 | 449 | GAcAGCCGUGGUGGAAuAGdTdT | 1102 |
| s | A-32317 | 440 | cAcGGcuGucGucAccAAudTdT | 1103 |
| as | A-32318 | 458 | AUUGGUGACGAcAGCCGUGdTdT | 1104 |
| s | A-32329 | 496 | AGGAcGAGGGAuGGGAuuudTdT | 1105 |
| as | A-32330 | 514 | AAAUCCcAUCCCUCGUCCUdTdT | 1106 |
| s | A-32361 | 556 | ucAccucAuAuGcuAuGuudTdT | 1107 |
| as | A-32362 | 574 | AAcAuAGcAuAUGAGGUGAdTdT | 1108 |
| s | A-32365 | 559 | ccucAuAuGcuAuGuuAGAdTdT | 1109 |
| as | A-32366 | 577 | UCuAAcAuAGcAuAUGAGGdTdT | 1110 |
| s | A-32377 | 570 | AuGuuAGAAGuccAGGcAGdTdT | 1111 |
| as | A-32378 | 588 | CUGCCUGGACUUCuAAcAUdTdT | 1112 |
| s | A-32389 | 78 | ucuGAGGcuGGcccuAcGGdTdT | 1113 |
| as | A-32390 | 96 | CCGuAGGGCcAGCCUcAGAdTdT | 1114 |
| s | A-32401 | 87 | GGcccuAcGGGcAccGGuGdTdT | 1115 |
| as | A-32402 | 105 | cACCGGUGCCCGuAGGGCCdTdT | 1116 |
| s | A-32413 | 95 | GGGcAccGGuGAAuccAAGdTdT | 1117 |
| as | A-32414 | 113 | CUUGGAUUcACCGGUGCCCdTdT | 1118 |
| s | A-32425 | 167 | ccAuGcAuGuGuucAGAAAdTdT | 1119 |
| as | A-32426 | 185 | UUUCUGAAcAcAUGcAUGGdTdT | 1120 |

TABLE 5
Identification numbers for rat TTR dsRNAs
See Table 7 for sequences.

| | Sense | Antisense |
|---|---|---|
| Duplex # | Oligo # | Oligo # |
| AD-18529 | A-32745 | A-32746 |
| AD-18530 | A-32747 | A-32748 |
| AD-18531 | A-32749 | A-32750 |
| AD-18532 | A-32751 | A-32752 |
| AD-18533 | A-32753 | A-32754 |
| AD-18534 | A-32755 | A-32756 |
| AD-18535 | A-32757 | A-32758 |
| AD-18536 | A-32759 | A-32760 |
| AD-18537 | A-32761 | A-32762 |
| AD-18538 | A-32763 | A-32764 |
| AD-18539 | A-32159 | A-32160 |
| AD-18540 | A-32765 | A-32766 |
| AD-18541 | A-32767 | A-32768 |
| AD-18542 | A-32769 | A-32770 |
| AD-18543 | A-32771 | A-32772 |
| AD-18544 | A-32773 | A-32774 |
| AD-18545 | A-32775 | A-32776 |
| AD-18546 | A-32777 | A-32778 |
| AD-18547 | A-32779 | A-32780 |
| AD-18548 | A-32781 | A-32782 |
| AD-18549 | A-32783 | A-32784 |
| AD-18550 | A-32785 | A-32786 |
| AD-18551 | A-32787 | A-32788 |
| AD-18552 | A-32791 | A-32792 |
| AD-18553 | A-32793 | A-32794 |
| AD-18554 | A-32795 | A-32796 |

TABLE 6A
Sense and antisense strand sequences
for rat TTR dsRNAs
Strand: s = sense; as = antisense;
Position: position of 5′ base on transcript
(NM_012681.1, SEQ ID NO: 1330)

| | | | SEQ | Sequence with 3′ | SEQ |
|---|---|---|---|---|---|
| | | Sequence | ID | dinucleotide overhang | ID |
| Strand | Position | (5′ to 3′) | NO: | (5′ to 3′) | NO: |
| s | 115 | GUCCUCUGAUGGUCAAAGU | 1121 | GUCCUCUGAUGGUCAAAGUNN | 1173 |
| as | 133 | ACUUUGACCAUCAGAGGAC | 1122 | ACUUUGACCAUCAGAGGACNN | 1174 |
| s | 537 | UUCUUGCUCUAUAAACCGU | 1123 | UUCUUGCUCUAUAAACCGUNN | 1175 |
| as | 555 | ACGGUUUAUAGAGCAAGAA | 1124 | ACGGUUUAUAGAGCAAGAANN | 1176 |
| s | 543 | CUCUAUAAACCGUGUUAGC | 1125 | CUCUAUAAACCGUGUUAGCNN | 1177 |
| as | 561 | GCUAACACGGUUUAUAGAG | 1126 | GCUAACACGGUUUAUAGAGNN | 1178 |
| s | 392 | UCGCCACUACACCAUCGCA | 1127 | UCGCCACUACACCAUCGCANN | 1179 |
| as | 410 | UGCGAUGGUGUAGUGGCGA | 1128 | UGCGAUGGUGUAGUGGCGANN | 1180 |
| s | 538 | UCUUGCUCUAUAAACCGUG | 1129 | UCUUGCUCUAUAAACCGUGNN | 1181 |
| as | 556 | CACGGUUUAUAGAGCAAGA | 1130 | CACGGUUUAUAGAGCAAGANN | 1182 |
| s | 541 | UGCUCUAUAAACCGUGUUA | 1131 | UGCUCUAUAAACCGUGUUANN | 1183 |
| as | 559 | UAACACGGUUUAUAGAGCA | 1132 | UAACACGGUUUAUAGAGCANN | 1184 |
| s | 532 | CAGUGUUCUUGCUCUAUAA | 1133 | CAGUGUUCUUGCUCUAUAANN | 1185 |
| as | 550 | UUAUAGAGCAAGAACACUG | 1134 | UUAUAGAGCAAGAACACUGNN | 1186 |
| s | 542 | GCUCUAUAAACCGUGUUAG | 1135 | GCUCUAUAAACCGUGUUAGNN | 1187 |
| as | 560 | CUAACACGGUUUAUAGAGC | 1136 | CUAACACGGUUUAUAGAGCNN | 1188 |
| s | 134 | CCUGGAUGCUGUCCGAGGC | 1137 | CCUGGAUGCUGUCCGAGGCNN | 1189 |
| as | 152 | GCCUCGGACAGCAUCCAGG | 1138 | GCCUCGGACAGCAUCCAGGNN | 1190 |
| s | 119 | UCUGAUGGUCAAAGUCCUG | 1139 | UCUGAUGGUCAAAGUCCUGNN | 1191 |
| as | 137 | CAGGACUUUGACCAUCAGA | 1140 | CAGGACUUUGACCAUCAGANN | 1192 |
| s | 241 | CUGGAGAGCUGCACGGGCU | 1141 | CUGGAGAGCUGCACGGGCUNN | 1193 |
| as | 259 | AGCCCGUGCAGCUCUCCAG | 1142 | AGCCCGUGCAGCUCUCCAGNN | 1194 |
| s | 544 | UCUAUAAACCGUGUUAGCA | 1143 | UCUAUAAACCGUGUUAGCANN | 1195 |
| as | 562 | UGCUAACACGGUUUAUAGA | 1144 | UGCUAACACGGUUUAUAGANN | 1196 |
| s | 530 | AACAGUGUUCUUGCUCUAU | 1145 | AACAGUGUUCUUGCUCUAUNN | 1197 |
| as | 548 | AUAGAGCAAGAACACUGUU | 1146 | AUAGAGCAAGAACACUGUUNN | 1198 |
| s | 118 | CUCUGAUGGUCAAAGUCCU | 1147 | CUCUGAUGGUCAAAGUCCUNN | 1199 |
| as | 136 | AGGACUUUGACCAUCAGAG | 1148 | AGGACUUUGACCAUCAGAGNN | 1200 |
| s | 140 | UGCUGUCCGAGGCAGCCCU | 1149 | UGCUGUCCGAGGCAGCCCUNN | 1201 |
| as | 158 | AGGGCUGCCUCGGACAGCA | 1150 | AGGGCUGCCUCGGACAGCANN | 1202 |
| s | 239 | GUCUGGAGAGCUGCACGGG | 1151 | GUCUGGAGAGCUGCACGGGNN | 1203 |
| as | 257 | CCCGUGCAGCUCUCCAGAC | 1152 | CCCGUGCAGCUCUCCAGACNN | 1204 |
| s | 531 | ACAGUGUUCUUGCUCUAUA | 1153 | ACAGUGUUCUUGCUCUAUANN | 1205 |
| as | 549 | UAUAGAGCAAGAACACUGU | 1154 | UAUAGAGCAAGAACACUGUNN | 1206 |
| s | 117 | CCUCUGAUGGUCAAAGUCC | 1155 | CCUCUGAUGGUCAAAGUCCNN | 1207 |
| as | 135 | GGACUUUGACCAUCAGAGG | 1156 | GGACUUUGACCAUCAGAGGNN | 1208 |
| s | 131 | AGUCCUGGAUGCUGUCCGA | 1157 | AGUCCUGGAUGCUGUCCGANN | 1209 |
| as | 149 | UCGGACAGCAUCCAGGACU | 1158 | UCGGACAGCAUCCAGGACUNN | 1210 |
| s | 217 | UUGCCUCUGGGAAGACCGC | 1159 | UUGCCUCUGGGAAGACCGCNN | 1211 |
| as | 235 | GCGGUCUUCCCAGAGGCAA | 1160 | GCGGUCUUCCCAGAGGCAANN | 1212 |
| s | 242 | UGGAGAGCUGCACGGGCUC | 1161 | UGGAGAGCUGCACGGGCUCNN | 1213 |
| as | 260 | GAGCCCGUGCAGCUCUCCA | 1162 | GAGCCCGUGCAGCUCUCCANN | 1214 |
| s | 244 | GAGAGCUGCACGGGCUCAC | 1163 | GAGAGCUGCACGGGCUCACNN | 1215 |
| as | 262 | GUGAGCCCGUGCAGCUCUC | 1164 | GUGAGCCCGUGCAGCUCUCNN | 1216 |
| s | 246 | GAGCUGCACGGGCUCACCA | 1165 | GAGCUGCACGGGCUCACCANN | 1217 |
| as | 264 | UGGUGAGCCCGUGCAGCUC | 1166 | UGGUGAGCCCGUGCAGCUCNN | 1218 |
| s | 399 | UACACCAUCGCAGCCCUGC | 1167 | UACACCAUCGCAGCCCUGCNN | 1219 |
| as | 417 | GCAGGGCUGCGAUGGUGUA | 1168 | GCAGGGCUGCGAUGGUGUANN | 1220 |
| s | 132 | GUCCUGGAUGCUGUCCGAG | 1169 | GUCCUGGAUGCUGUCCGAGNN | 1221 |
| as | 150 | CUCGGACAGCAUCCAGGAC | 1170 | CUCGGACAGCAUCCAGGACNN | 1222 |
| s | 245 | AGAGCUGCACGGGCUCACC | 1171 | AGAGCUGCACGGGCUCACCNN | 1223 |
| as | 263 | GGUGAGCCCGUGCAGCUCU | 1172 | GGUGAGCCCGUGCAGCUCUNN | 1224 |

TABLE 6B
Sense and antisense strand sequences
for rat TTR dsRNAs
Strand: s = sense; as = antisense;
Position: position of 5′ base on transcript
(NM_012681.1, SEQ ID NO: 1330)

| | | Sequence with | SEQ |
|---|---|---|---|
| | | 3′ deoxythimidine | ID |
| Strand | Position | overhang (5′ to 3′) | NO: |
| s | 115 | GUCCUCUGAUGGUCAAAGUdTdT | 1225 |
| as | 133 | ACUUUGACCAUCAGAGGACdTdT | 1226 |
| s | 537 | UUCUUGCUCUAUAAACCGUdTdT | 1227 |
| as | 555 | ACGGUUUAUAGAGCAAGAAdTdT | 1228 |
| s | 543 | CUCUAUAAACCGUGUUAGCdTdT | 1229 |
| as | 561 | GCUAACACGGUUUAUAGAGdTdT | 1230 |
| s | 392 | UCGCCACUACACCAUCGCAdTdT | 1231 |
| as | 410 | UGCGAUGGUGUAGUGGCGAdTdT | 1232 |
| s | 538 | UCUUGCUCUAUAAACCGUGdTdT | 1233 |
| as | 556 | CACGGUUUAUAGAGCAAGAdTdT | 1234 |
| s | 541 | UGCUCUAUAAACCGUGUUAdTdT | 1235 |
| as | 559 | UAACACGGUUUAUAGAGCAdTdT | 1236 |
| s | 532 | CAGUGUUCUUGCUCUAUAAdTdT | 1237 |
| as | 550 | UUAUAGAGCAAGAACACUGdTdT | 1238 |
| s | 542 | GCUCUAUAAACCGUGUUAGdTdT | 1239 |
| as | 560 | CUAACACGGUUUAUAGAGCdTdT | 1240 |
| s | 134 | CCUGGAUGCUGUCCGAGGCdTdT | 1241 |
| as | 152 | GCCUCGGACAGCAUCCAGGdTdT | 1242 |
| s | 119 | UCUGAUGGUCAAAGUCCUGdTdT | 1243 |
| as | 137 | CAGGACUUUGACCAUCAGAdTdT | 1244 |
| s | 241 | CUGGAGAGCUGCACGGGCUdTdT | 1245 |
| as | 259 | AGCCCGUGCAGCUCUCCAGdTdT | 1246 |
| s | 544 | UCUAUAAACCGUGUUAGCAdTdT | 1247 |
| as | 562 | UGCUAACACGGUUUAUAGAdTdT | 1248 |
| s | 530 | AACAGUGUUCUUGCUCUAUdTdT | 1249 |
| as | 548 | AUAGAGCAAGAACACUGUUdTdT | 1250 |
| s | 118 | CUCUGAUGGUCAAAGUCCUdTdT | 1251 |
| as | 136 | AGGACUUUGACCAUCAGAGdTdT | 1252 |
| s | 140 | UGCUGUCCGAGGCAGCCCUdTdT | 1253 |
| as | 158 | AGGGCUGCCUCGGACAGCAdTdT | 1254 |
| s | 239 | GUCUGGAGAGCUGCACGGGdTdT | 1255 |
| as | 257 | CCCGUGCAGCUCUCCAGACdTdT | 1256 |
| s | 531 | ACAGUGUUCUUGCUCUAUAdTdT | 1257 |
| as | 549 | UAUAGAGCAAGAACACUGUdTdT | 1258 |
| s | 117 | CCUCUGAUGGUCAAAGUCCdTdT | 1259 |
| as | 135 | GGACUUUGACCAUCAGAGGdTdT | 1260 |
| s | 131 | AGUCCUGGAUGCUGUCCGAdTdT | 1261 |
| as | 149 | UCGGACAGCAUCCAGGACUdTdT | 1262 |
| s | 217 | UUGCCUCUGGGAAGACCGCdTdT | 1263 |
| as | 235 | GCGGUCUUCCCAGAGGCAAdTdT | 1264 |
| s | 242 | UGGAGAGCUGCACGGGCUCdTdT | 1265 |
| as | 260 | GAGCCCGUGCAGCUCUCCAdTdT | 1266 |
| s | 244 | GAGAGCUGCACGGGCUCACdTdT | 1267 |
| as | 262 | GUGAGCCCGUGCAGCUCUCdTdT | 1268 |
| s | 246 | GAGCUGCACGGGCUCACCAdTdT | 1269 |
| as | 264 | UGGUGAGCCCGUGCAGCUCdTdT | 1270 |
| s | 399 | UACACCAUCGCAGCCCUGCdTdT | 1271 |
| as | 417 | GCAGGGCUGCGAUGGUGUAdTdT | 1272 |
| s | 132 | GUCCUGGAUGCUGUCCGAGdTdT | 1273 |
| as | 150 | CUCGGACAGCAUCCAGGACdTdT | 1274 |
| s | 245 | AGAGCUGCACGGGCUCACCdTdT | 1275 |
| as | 263 | GGUGAGCCCGUGCAGCUCUdTdT | 1276 |

TABLE 7
Chemically modified sense and antisense
strand sequences for rat TTR dsRNAs
See Table 5 for duplex # (dsRNA name).
Strand: s = sense; as = antisense;
Position: position of 5′ base on transcript
(NM_012681.1, SEQ ID NO: 1330)

| | | | | SEQ |
|---|---|---|---|---|
| | Oligo | Po- | | ID |
| Strand | # | sition | Sequence (5′ to 3′) | NO: |
| s | A-32159 | 115 | GuccucuGAuGGucAAAGudTdT | 1277 |
| as | A-32160 | 133 | ACUUUGACcAUcAGAGGACdTdT | 1278 |
| s | A-32745 | 537 | uucuuGcucuAuAAAccGudTdT | 1279 |
| as | A-32746 | 555 | ACGGUUuAuAGAGcAAGAAdTdT | 1280 |
| s | A-32747 | 543 | cucuAuAAAccGuGuuAGcdTdT | 1281 |
| as | A-32748 | 561 | GCuAAcACGGUUuAuAGAGdTdT | 1282 |
| s | A-32749 | 392 | ucGccAcuAcAccAucGcAdTdT | 1283 |
| as | A-32750 | 410 | UGCGAUGGUGuAGUGGCGAdTdT | 1284 |
| s | A-32751 | 538 | ucuuGcucuAuAAAccGuGdTdT | 1285 |
| as | A-32752 | 556 | cACGGUUuAuAGAGcAAGAdTdT | 1286 |
| s | A-32753 | 541 | uGcucuAuAAAccGuGuuAdTdT | 1287 |
| as | A-32754 | 559 | uAAcACGGUUuAuAGAGcAdTdT | 1288 |
| s | A-32755 | 532 | cAGuGuucuuGcucuAuAAdTdT | 1289 |
| as | A-32756 | 550 | UuAuAGAGcAAGAAcACUGdTdT | 1290 |
| s | A-32757 | 542 | GcucuAuAAAccGuGuuAGdTdT | 1291 |
| as | A-32758 | 560 | CuAAcACGGUUuAuAGAGCdTdT | 1292 |
| s | A-32759 | 134 | ccuGGAuGcuGuccGAGGcdTdT | 1293 |
| as | A-32760 | 152 | GCCUCGGAcAGcAUCcAGGdTdT | 1294 |
| s | A-32761 | 119 | ucuGAuGGucAAAGuccuGdTdT | 1295 |
| as | A-32762 | 137 | cAGGACUUUGACcAUcAGAdTdT | 1296 |
| s | A-32763 | 241 | cuGGAGAGcuGcAcGGGcudTdT | 1297 |
| as | A-32764 | 259 | AGCCCGUGcAGCUCUCcAGdTdT | 1298 |
| s | A-32765 | 544 | ucuAuAAAccGuGuuAGcAdTdT | 1299 |
| as | A-32766 | 562 | UGCuAAcACGGUUuAuAGAdTdT | 1300 |
| s | A-32767 | 530 | AAcAGuGuucuuGcucuAudTdT | 1301 |
| as | A-32768 | 548 | AuAGAGcAAGAAcACUGUUdTdT | 1302 |
| s | A-32769 | 118 | cucuGAuGGucAAAGuccudTdT | 1303 |
| as | A-32770 | 136 | AGGACUUUGACcAUcAGAGdTdT | 1304 |
| s | A-32771 | 140 | uGcuGuccGAGGcAGcccudTdT | 1305 |
| as | A-32772 | 158 | AGGGCUGCCUCGGAcAGcAdTdT | 1306 |
| s | A-32773 | 239 | GucuGGAGAGcuGcAcGGGdTdT | 1307 |
| as | A-32774 | 257 | CCCGUGcAGCUCUCcAGACdTdT | 1308 |
| s | A-32775 | 531 | AcAGuGuucuuGcucuAuAdTdT | 1309 |
| as | A-32776 | 549 | uAuAGAGcAAGAAcACUGUdTdT | 1310 |
| s | A-32777 | 117 | ccucuGAuGGucAAAGuccdTdT | 1311 |
| as | A-32778 | 135 | GGACUUUGACcAUcAGAGGdTdT | 1312 |
| s | A-32779 | 131 | AGuccuGGAuGcuGuccGAdTdT | 1313 |
| as | A-32780 | 149 | UCGGAcAGcAUCcAGGACUdTdT | 1314 |
| s | A-32781 | 217 | uuGccucuGGGAAGAccGcdTdT | 1315 |
| as | A-32782 | 235 | GCGGUCUUCCcAGAGGcAAdTdT | 1316 |
| s | A-32783 | 242 | uGGAGAGcuGcAcGGGcucdTdT | 1317 |
| as | A-32784 | 260 | GAGCCCGUGcAGCUCUCcAdTdT | 1318 |
| s | A-32785 | 244 | GAGAGcuGcAcGGGcucAcdTdT | 1319 |
| as | A-32786 | 262 | GUGAGCCCGUGcAGCUCUCdTdT | 1320 |
| s | A-32787 | 246 | GAGcuGcAcGGGcucAccAdTdT | 1321 |
| as | A-32788 | 264 | UGGUGAGCCCGUGcAGCUCdTdT | 1322 |
| s | A-32791 | 399 | uAcAccAucGcAGcccuGcdTdT | 1323 |
| as | A-32792 | 417 | GcAGGGCUGCGAUGGUGuAdTdT | 1324 |
| s | A-32793 | 132 | GuccuGGAuGcuGuccGAGdTdT | 1325 |
| as | A-32794 | 150 | CUCGGAcAGcAUCcAGGACdTdT | 1326 |
| s | A-32795 | 245 | AGAGcuGcAcGGGcucAccdTdT | 1327 |
| as | A-32796 | 263 | GGUGAGCCCGUGcAGCUCUdTdT | 1328 |

### Synthesis of TTR Sequences

[0239] TTR sequences were synthesized on MerMade 192 synthesizer at 1 μmol scale. For all the sequences in the list, ‘endolight’ chemistry was applied as detailed below.
[0240] All pyrimidines (cytosine and uridine) in the sense strand were replaced with corresponding 2′-O-Methyl bases (2′ O-Methyl C and 2′-O-Methyl U)·
[0241] In the antisense strand, pyrimidines adjacent to (towards 5′ position) ribo A nucleoside were replaced with their corresponding 2-O-Methyl nucleosides
[0242] A two base dTdT extension at 3′ end of both sense and antisense sequences was introduced
[0243] The sequence file was converted to a text file to make it compatible for loading in the MerMade 192 synthesis software

[0244] The synthesis of TTR sequences used solid supported oligonucleotide synthesis using phosphoramidite chemistry. The synthesis of the above sequences was performed at 1 um scale in 96 well plates. The amidite solutions were prepared at 0.1M concentration and ethyl thio tetrazole (0.6M in Acetonitrile) was used as activator.

[0245] The synthesized sequences were cleaved and deprotected in 96 well plates, using methylamine in the first step and triethylamine·3HF in the second step. The crude sequences thus obtained were precipitated using acetone: ethanol mix and the pellet were re-suspended in 0.5M sodium acetate buffer. Samples from each sequence were analyzed by LC-MS and the resulting mass data confirmed the identity of the sequences. A selected set of samples were also analyzed by IEX chromatography.

[0246] The next step in the process was purification. All sequences were purified on an AKTA explorer purification system using Source 15Q column. A single peak corresponding to the full length sequence was collected in the eluent and was subsequently analyzed for purity by ion exchange chromatography.

[0247] The purified sequences were desalted on a Sephadex G25 column using AKTA purifier. The desalted TTR sequences were analyzed for concentration and purity. The single strands were then annealed to form TTR-dsRNA.

### Example 2B: In Vitro Screening of TTR siRNAs for mRNA Suppression

[0248] Human TTR targeting dsRNAs (Table 2) were assayed for inhibition of endogenous TTR expression in HepG2 and Hep3B cells, using qPCR (real time PCR) and bDNA (branched DNA) assays to quantify TTR mRNA. Rodent TTR targeting dsRNA (Table 5) were synthesized and assayed for inhibition of endogenous TTR expression using bDNA assays in H.4.II.E cells. Results from single dose assays were used to select a subset of TTR dsRNA duplexes for dose response experiments to calculate IC50's. IC50 results were used to select TTR dsRNAs for further testing.

### Cell Culture and Transfections:

[0249] The hepatocyte cell lines HepG2, Hep3B and H.4.II.E cells (ATCC, Manassas, VA) were grown to near confluence at 37° C. in an atmosphere of 5% CO₂ in Dulbecco's modified Eagle's medium (ATCC) supplemented with 10% FBS, streptomycin, and glutamine (ATCC) before being released from the plate by trypsinization. H.4.II.E cells were also grown in Earle's minimal essential medium. Reverse transfection was carried out by adding 5 μl of Opti-MEM to 5 μl of siRNA duplexes per well into a 96-well plate along with 10 μl of Opti-MEM plus 0.2 μl of Lipofectamine RNAiMax per well (Invitrogen, Carlsbad CA. cat #13778-150) and incubated at room temperature for 15 minutes. 80 μl of complete growth media without antibiotics containing 4×10⁴ (HepG2), 2×10⁴ (Hep3B) or 2×10⁴ (H.4.II.E) cells were then added. Cells were incubated for 24 hours prior to RNA purification. Single dose experiments were performed at 10 nM final duplex concentration and dose response experiments were done with 10, 1, 0.5, 0.1, 0.05, 0.01, 0.005, 0.001, 0.0005, 0.0001, 0.00005, 0.00001 nM.

### Total RNA Isolation Using MagMAX-96 Total RNA Isolation Kit (Applied Biosystems, Foster City CA, Part #: AM1830):

[0250] Cells were harvested and lysed in 140 μl of Lysis/Binding Solution then mixed for 1 minute at 850 rpm using and Eppendorf Thermomixer (the mixing speed was the same throughout the process). Twenty micro liters of magnetic beads were added into cell-lysate and mixed for 5 minutes. Magnetic beads were captured using magnetic stand and the supernatant was removed without disturbing the beads. After removing supernatant, magnetic beads were washed with Wash Solution 1 (isopropanol added) and mixed for 1 minute. Beads were captured again and supernatant removed. Beads were then washed with 150 μl Wash Solution 2 (Ethanol added), captured and supernatant was removed. 50 μl of DNase mixture (MagMax turbo DNase Buffer and Turbo DNase) was then added to the beads and they were mixed for 10 to 15 minutes. After mixing, 100 μl of RNA Rebinding Solution was added and mixed for 3 minutes. Supernatant was removed and magnetic beads were washed again with 150 μl Wash Solution 2 and mixed for 1 minute and supernatant was removed completely. The magnetic beads were mixed for 2 minutes to dry before RNA it was eluted with 50 μl of water.

cDNA Synthesis Using ABI High Capacity cDNA Reverse Transcription Kit (Applied Biosystems, Foster City, CA, Cat #4368813):

[0251] A master mix of 2 μl 10× Buffer, 0.8 μl 25× dNTPs, 2 μl Random primers, 1 μl Reverse Transcriptase, 1 μl RNase inhibitor and 3.2 μl of H2O per reaction were added into 10 μl total RNA. cDNA was generated using a Bio-Rad C-1000 or S-1000 thermal cycler (Hercules, CA) through the following steps: 25° C. 10 min, 37° C. 120 min, 85° C. 5 sec, 4° C. hold.

### Real Time PCR:

[0252] 2 μl of cDNA was added to a master mix of 1 μl 18S TaqMan Probe (Applied Biosystems Cat #4319413E), 1 μl TTR TaqMan probe (Applied Biosystems cat #HS00174914 M1) and 10 μl TaqMan Universal PCR Master Mix (Applied Biosystems Cat #4324018) per well in a MicroAmp Optical 96 well plate (Applied Biosystems cat #4326659). Real time PCR was done in an ABI 7000 Prism or an ABI 7900HT Real Time PCR system (Applied Biosystems) using the ΔΔ Ct(RQ) assay. All reactions were done in triplicate.

[0253] Real time data were analyzed using the AA Ct method and normalized to assays performed from cells transfected with 10 nM BlockIT fluorescent Oligo (Invitrogen Cat #2013) or 10 nM AD-1955 (a control duplex that targets the non-mammalian luciferase gene) to calculate fold change.

Branched DNA assays-QuantiGene 1.0 (Panomics, Fremont, CA. cat #: QG0004)—Used to Screen Rodent Specific Duplexes

[0254] H.4.II.E cells (ATCC) were transfected with 10 nM siRNA. After removing media, H.4.II.E were lysed in 100 μl of Diluted Lysis Mixture (a mixture of 1 volume of Lysis mixture, 2 volume of nuclease-free water and 10 μl of Proteinase-K per ml for the final concentration of 20 mg/ml) then incubated at 65° C. for 35 minutes. Then, 80 μl of Working Probe Set (a mixture of TTR or GAPDH probe) and 20 μl of cell-lysate were added into the Capture Plate. Capture Plates were incubated at 53° C.±1° C. overnight (approximately 16-20 hrs). Capture Plates were washed 3 times with 1× Wash Buffer (a mixture of nuclease-free water, Buffer Component 1 and Wash Buffer Component 2), then dried by centrifuging for 1 minute at 1000 rpm. 100 μl of Amplifier Working Reagent was added into the Capture Plate, which was then sealed and incubated for 1 hour at 46° C.±1° C. Wash and dry steps were repeated after 1 hour of incubation and 100 μl of Label Solution Reagent was added. The plate was then washed, dried and 100 μl Substrate (a mixture of Lithium Lauryl Sulfate and Substrate solution) was added. Capture Plates were placed in the incubator for 30 minutes at 46° C.±1° C. Capture Plates were then removed from the incubator and incubated at room temperature for 30 minutes. Finally, the Capture Plates were read using the Victor Luminometer (Perkin Elmer, Waltham, MA).

### Branched DNA Assays—QuantiGene 2.0 (Panomics Cat #: QS0011): Used to Screen all Other Duplexes

[0255] After a 24 hour incubation at the dose or doses stated, media was removed and cells were lysed in 100 μl Lysis Mixture (1 volume lysis mixture, 2 volumes nuclease-free water and 10 μl of Proteinase-K/ml for a final concentration of 20 mg/ml) then incubated at 65° C. for 35 minutes. 20 μl Working Probe Set (TTR probe for gene target and GAPDH for endogenous control) and 80 μl of cell-lysate were then added to the Capture Plates. Capture Plates were incubated at 55° C.±1° C. (approx. 16-20 hrs). The next day, the Capture Plates were washed 3 times with 1× Wash Buffer (nuclease-free water, Buffer Component 1 and Wash Buffer Component 2), then dried by centrifuging for 1 minute at 240 g. 100 μl of pre-Amplifier Working Reagent was added to the Capture Plates, which were sealed with aluminum foil and incubated for 1 hour at 55° C.±1° C. Following a 1 hour incubation, the wash step was repeated, then 100 μl Amplifier Working Reagent was added. After 1 hour, the wash and dry steps were repeated, and 100 μl Label Probe was added. Capture plates were incubated 50° C.±1° C. for 1 hour. The plates were then washed with 1× Wash Buffer and dried, and then 100 μl Substrate was added to the Capture Plates. Capture Plates were read using the SpectraMax Luminometer (Molecular Devices, Sunnyvale, CA) following 5 to 15 minutes incubation.

bDNA Data Analysis:

[0256] bDNA data were analyzed by (i) subtracting the average background from each triplicate sample, (ii) averaging the resultant triplicate GAPDH (control probe) and TTR (experimental probe) values, and then (iii) taking the ratio: (experimental probe-background)/(control probe-background).

### Results

[0257] A summary of the single dose and IC50 results for TTR-dsRNAs (TTR siRNAs) are presented below in Table 8. Single dose results are expressed as % TTR mRNA relative to control, assayed in HepG2 cells. IC50s were determined in HepG2 and/or Hep3B cells, as indicated.

TABLE 8
Single dose and IC50 results of in vitro screens of TTR siRNAs

| | Single Dose at 10 nM | | | | | |
|---|---|---|---|---|---|---|
| | % relative to control | | IC50 (nM) | | | |
| | HepG2 | | HepG2 | | Hep3B | |
| Duplex # | qPCR | bDNA | qPCR | bDNA | qPCR | bDNA |
| AD-18243 | 50.35 | 141.53 | ND | ND | ND | ND |
| AD-18244 | 64.26 | 158.55 | ND | ND | ND | ND |
| AD-18245 | 56.89 | 107.22 | ND | ND | ND | ND |
| AD-18246 | 10.53 | 32.51* | 0.265 | 0.086 | ND | ND |
| AD-18247 | 125.56 | 69.57 | ND | ND | ND | ND |
| AD-18248 | 127.78 | 66.97 | ND | ND | ND | ND |
| AD-18249 | 48.77 | 48.76 | ND | ND | ND | ND |
| AD-18250 | 96.94 | 86.42 | ND | ND | ND | ND |
| AD-18251 | 170.41 | 129.15 | ND | ND | ND | ND |
| AD-18252 | 73.52 | 81.90 | ND | ND | ND | ND |
| AD-18253 | 25.25 | 61.25 | ND | ND | ND | ND |
| AD-18254 | 95.13 | 103.96 | ND | ND | ND | ND |
| AD-18255 | 119.46 | ND | ND | ND | ND | ND |
| AD-18256 | 42.64 | 95.67 | ND | ND | ND | ND |
| AD-18257 | 146.25 | 141.75 | ND | ND | ND | ND |
| AD-18258 | 10.20 | 13.41* | 0.007 | 0.005 | 0.004 | 0.005 |
| AD-18259 | 9.30 | 20.91* | 0.102 | 0.005 | ND | ND |
| AD-18260 | 125.37 | 81.36 | ND | ND | ND | ND |
| AD-18261 | 14.27 | 19.40* | 0.210 | ND | ND | ND |
| AD-18262 | 84.95 | 104.05 | ND | ND | ND | ND |
| AD-18263 | 16.32 | 23.25* | 0.110 | ND | ND | ND |
| AD-18264 | 104.18 | 83.69 | ND | ND | ND | ND |
| AD-18265 | 41.62 | 64.87 | ND | ND | ND | ND |
| AD-18266 | 39.98 | 110.53 | ND | ND | ND | ND |
| AD-18267 | 149.64 | ND | ND | ND | ND | ND |
| AD-18268 | 152.93 | 174.04 | ND | ND | ND | ND |
| AD-18269 | 37.27 | 92.28 | ND | ND | ND | ND |
| AD-18270 | 99.44 | 164.75 | ND | ND | ND | ND |
| AD-18271 | 18.89 | 28.33* | 0.503 | 0.004 | ND | ND |
| AD-18272 | 128.32 | 132.58 | ND | ND | ND | ND |
| AD-18273 | 115.78 | 201.95 | ND | ND | ND | ND |
| AD-18274 | 8.97 | 20.04* | 0.009 | 0.176 | 0.036 | 0.012 |
| AD-18275 | 4.09 | 22.25* | 0.026 | 0.118 | ND | ND |
| AD-18276 | 19.73 | 45.22* | 0.198 | 0.677 | ND | ND |
| AD-18277 | 10.55 | 26.31* | 0.121 | 0.426 | ND | ND |
| AD-18278 | 108.86 | 116.26 | ND | ND | ND | ND |
| AD-18279 | 66.59 | ND | ND | ND | ND | ND |
| AD-18280 | 103.26 | 170.52 | ND | ND | ND | ND |
| AD-18281 | 87.98 | 123.88 | ND | ND | ND | ND |
| AD-18282 | 82.47 | 140.32 | ND | ND | ND | ND |
| AD-18283 | 106.54 | 182.78 | ND | ND | ND | ND |
| AD-18284 | 106.93 | 151.78 | ND | ND | ND | ND |
| AD-18285 | 26.58 | 60.05* | ND | 0.089 | ND | ND |
| AD-18286 | 109.95 | 173.66 | ND | ND | ND | ND |
| AD-18287 | 54.23 | 155.45 | ND | ND | ND | ND |
| AD-18288 | 73.52 | 174.09 | ND | ND | ND | ND |
| AD-18289 | 103.36 | 174.76 | ND | ND | ND | ND |
| AD-18290 | 17.06 | 52.04* | 1.253 | 0.181 | ND | ND |
| AD-18291 | 7.71 | 169.29* | 1.304 | 0.019 | ND | ND |
| AD-18292 | 7.51 | 210.03* | 0.604 | 0.005 | ND | ND |
| AD-18293 | 3.61 | 62.53* | 0.078 | 0.003 | ND | ND |
| AD-18294 | 111.53 | 107.56 | ND | ND | ND | ND |
| AD-18295 | 115.88 | 105.37 | ND | ND | ND | ND |
| AD-18296 | 57.03 | 38.03 | ND | ND | ND | ND |
| AD-18297 | 87.69 | 73.87 | ND | ND | ND | ND |
| AD-18298 | 10.39 | 7.25* | 0.455 | 0.008 | ND | ND |
| AD-18299 | 18.79 | 18.06* | 0.895 | 0.014 | ND | ND |
| AD-18300 | 108.70 | ND | ND | ND | ND | ND |
| AD-18301 | 114.22 | 70.50 | ND | ND | ND | ND |
| AD-18302 | 116.19 | 122.40 | ND | ND | ND | ND |
| AD-18303 | 124.89 | ND | ND | ND | ND | ND |
| AD-18304 | 132.99 | 89.54 | ND | ND | ND | ND |
| AD-18305 | 153.10 | ND | ND | ND | ND | ND |
| AD-18306 | 159.22 | ND | ND | ND | ND | ND |
| AD-18307 | 116.83 | 84.57 | ND | ND | ND | ND |
| AD-18308 | 156.72 | 87.80 | ND | ND | ND | ND |
| AD-18309 | 113.22 | 101.97 | ND | ND | ND | ND |
| AD-18310 | 132.33 | ND | ND | ND | ND | ND |
| AD-18311 | 161.68 | 92.92 | ND | ND | ND | ND |
| AD-18312 | 103.01 | 71.17 | ND | ND | ND | ND |
| AD-18313 | 120.65 | 53.26 | ND | ND | ND | ND |
| AD-18314 | 116.33 | ND | ND | ND | ND | ND |
| AD-18315 | 115.13 | ND | ND | ND | ND | ND |
| AD-18316 | 118.73 | 122.34 | ND | ND | ND | ND |
| AD-18317 | 114.03 | 121.10 | ND | ND | ND | ND |
| AD-18318 | 80.85 | 122.57 | ND | ND | ND | ND |
| AD-18319 | 119.14 | 148.87 | ND | ND | ND | ND |
| AD-18320 | 22.86 | 55.43* | ND | 0.023 | 0.403 | ND |
| AD-18321 | 6.44 | 31.56* | 0.001 | 0.033 | ND | ND |
| AD-18322 | 54.21 | 100.46 | ND | ND | ND | ND |
| AD-18323 | 6.37 | 28.71* | 0.005 | 0.023 | ND | ND |
| AD-18324 | 2.53 | 15.98* | 0.002 | 0.006 | 0.005 | 0.014 |
| AD-18325 | 2.52 | 11.96* | 0.001 | 0.016 | ND | ND |
| AD-18326 | 18.34 | 43.16* | 0.025 | 0.186 | ND | ND |
| AD-18327 | 18.28 | 13.90* | 0.044 | 0.215 | ND | ND |
| AD-18328 | 4.53 | 26.04* | 0.003 | 0.004 | 0.006 | 0.006 |
| AD-18329 | 96.93 | 131.54 | ND | ND | ND | ND |
| AD-18330 | 11.80 | 45.18* | 0.0004 | 0.010 | 0.020 | ND |
| AD-18331 | 117.77 | 163.07 | ND | ND | ND | ND |
| AD-18332 | 11.53 | 35.09* | 0.001 | 0.076 | 0.065 | ND |
| AD-18333 | 12.24 | 46.94* | 0.001 | 0.115 | 0.075 | ND |
| AD-18334 | 16.27 | 55.28* | 0.0004 | 0.181 | 1.071 | ND |
| AD-18335 | 53.52 | 112.80 | ND | ND | ND | ND |
| AD-18336 | 6.39 | 33.00* | 0.001 | 0.112 | 0.081 | ND |
| AD-18337 | 51.77 | 105.33 | ND | ND | ND | ND |
| AD-18338 | 48.21 | 102.86 | ND | ND | ND | ND |
| AD-18339 | 6.48 | 26.56* | 0.004 | 0.002 | 0.018 | 0.029 |
| AD-18340 | 4.53 | 30.76* | 0.002 | 0.002 | ND | ND |
| AD-18341 | 31.27 | 100.41 | ND | ND | ND | ND |
| AD-18342 | 7.60 | 42.89* | ND | 0.016 | 0.076 | ND |
| AD-18343 | 3.42 | 17.45* | ND | 0.001 | ND | ND |
| AD-18344 | 75.08 | 134.31 | ND | ND | ND | ND |
| AD-18345 | 13.62 | 42.75* | 0.002 | 0.013 | ND | ND |
| AD-18346 | 59.25 | 121.10 | ND | ND | ND | ND |
| AD-18347 | 91.23 | 139.54 | ND | ND | ND | ND |
| AD-18348 | 89.95 | 159.29 | ND | ND | ND | ND |
| AD-18349 | 108.01 | 144.96 | ND | ND | ND | ND |
| AD-18350 | 123.65 | 125.87 | ND | ND | ND | ND |
| AD-18351 | 108.36 | 104.02 | ND | ND | ND | ND |
| AD-18352 | 87.82 | 128.72 | ND | ND | ND | ND |
| AD-18353 | 14.40 | 65.77 | 0.012 | 0.027 | ND | ND |
| AD-18354 | 99.27 | 123.53 | ND | ND | ND | ND |
| AD-18355 | 135.04 | 150.88 | ND | ND | ND | ND |
| AD-18356 | 100.76 | 178.96 | ND | ND | ND | ND |
| AD-18357 | 125.30 | 162.85 | ND | ND | ND | ND |
| AD-18358 | 103.15 | 136.01 | ND | ND | ND | ND |
| AD-18359 | 34.74 | 140.48 | ND | ND | ND | ND |
| AD-18360 | 103.86 | 146.86 | ND | ND | ND | ND |
| AD-18361 | 105.74 | 152.74 | ND | ND | ND | ND |
| AD-18362 | 106.96 | 188.22 | ND | ND | ND | ND |
| AD-18363 | 124.22 | 58.46 | ND | ND | ND | ND |
| AD-18364 | 113.75 | 66.87 | ND | ND | ND | ND |
| AD-18446 | 29.73 | 13.30 | ND | ND | ND | ND |
| AD-18447 | 109.74 | 53.63 | ND | ND | ND | ND |
| AD-18448 | 22.96 | 8.81 | ND | ND | ND | ND |
| AD-18449 | 112.59 | 50.11 | ND | ND | ND | ND |
| AD-18450 | 89.41 | 34.89 | ND | ND | ND | ND |
| AD-18451 | 74.35 | 23.88 | ND | ND | ND | ND |
| AD-18452 | 125.25 | 54.86 | ND | ND | ND | ND |
| AD-18453 | 126.98 | 56.31 | ND | ND | ND | ND |
| AD-18454 | 113.88 | 52.48 | ND | ND | ND | ND |
| AD-18455 | 163.00 | 48.89 | ND | ND | ND | ND |
| AD-18456 | 15.70 | 10.52 | ND | ND | ND | ND |
| AD-18457 | 12.86 | 8.22 | ND | ND | ND | ND |
| AD-18458 | 13.00 | 7.00 | ND | ND | ND | ND |
| AD-18459 | 14.41 | 10.72 | ND | ND | ND | ND |
| AD-18460 | 121.16 | 74.87 | ND | ND | ND | ND |
| AD-18461 | 100.53 | 71.87 | ND | ND | ND | ND |
| AD-18462 | 47.75 | 29.35 | ND | ND | ND | ND |
| AD-18463 | 58.98 | 44.79 | ND | ND | ND | ND |

ND: no data;
*indicates result that represents average of two experiments.

[0258] The dose response data used to identify the IC50 for 5 TTR-dsRNAs (AD-18258, AD-18274, AD-18324, AD-18328, and AD-18339), are presented in detail below in Table 9. All 5 siRNAs were determined to have pM IC50s. The IC50 data for dsRNAs in Table 8 is a summary of the data presented in Table 9 below.

TABLE 9
Dose response data for 5 TTR-dsRNAs

| | | % inhibition relative to control AD-1955 | | | | | | | | | | | | |
|---|---|---|---|---|---|---|---|---|---|---|---|---|---|---|
| | Detection | Dose of duplex (nM) | | | | | | | | | | | | IC50 |
| Cell type | method | 10 | 1 | 0.5 | 0.1 | 0.05 | 0.01 | 0.005 | 0.001 | 0.0005 | 0.0001 | 0.00005 | 0.00001 | (nM) |
| Duplex AD-18258 | | | | | | | | | | | | | | |
| HepG2 | qPCR | 14.4 | 14.1 | 16.2 | 23.9 | 27.26 | 40.19 | 68.46 | 78.1 | 74.48 | 104.37 | 98.28 | 113.68 | 0.007 |
| HepG2 | bDNA | 14.3 | 14.5 | 11.1 | 12.8 | 18.82 | 19.77 | 51.21 | 56.03 | 63.63 | 58.35 | 43.64 | 51.05 | 0.005 |
| Hep3B | qPCR | 11.9 | 8.62 | 12.4 | 16.4 | 28.35 | 30.49 | 58.36 | 54.57 | 81.26 | 89.43 | 81.85 | 101.87 | 0.004 |
| Hep3B | bDNA | 7.65 | 7.5 | 11.3 | 12.6 | 28.85 | 27.89 | 64.57 | 73.48 | 72.03 | 91.44 | 86.71 | 89.31 | 0.005 |
| Duplex AD-18274 | | | | | | | | | | | | | | |
| HepG2 | qPCR | 6.68 | 8.45 | 11.7 | 24.2 | 42.08 | 49.89 | 56.95 | 62.99 | 64.47 | 54.92 | 67.39 | 72.67 | 0.009 |
| HepG2 | bDNA | 27.5 | 69 | 25.2 | 34.2 | 73.03 | 103.4 | 121.57 | 97.31 | 154.93 | 156.7 | Nd | 152.25 | 0.176 |
| Hep3B | qPCR | 7.58 | 17 | 15.6 | 43.9 | 42.22 | 60.55 | 78.8 | 77.81 | 79.97 | 85.84 | 86.13 | 83.99 | 0.036 |
| Hep3B | bDNA | 3.77 | 4.92 | 7.51 | 15 | 35.21 | 51.66 | 72.45 | 70.12 | 78.31 | 77.52 | 90.72 | 83.01 | 0.012 |
| Duplex AD-18324 | | | | | | | | | | | | | | |
| HepG2 | qPCR | 2.07 | 2.27 | 2.74 | 6.36 | 8.18 | 15.23 | 28.82 | 52.79 | 90.86 | 94.72 | 116.07 | 98.97 | 0.002 |
| HepG2 | bDNA | 14.5 | 7.88 | 11.8 | 15.9 | 17.2 | 46.44 | 40.4 | 91.86 | 0 | 95.57 | 0 | 52.15 | 0.006 |
| Hep3B | qPCR | 2.07 | 3.48 | 5.76 | 16.2 | 18.73 | 44.54 | 49.77 | 68.88 | 63.48 | 76.61 | 74.7 | 77.83 | 0.005 |
| Hep3B | bDNA | 3.48 | 3.8 | 5.15 | 15.2 | 30.84 | 55.36 | 74.75 | 99.39 | 88.89 | 110.83 | 96.55 | 110.26 | 0.014 |
| Duplex AD-18328 | | | | | | | | | | | | | | |
| HepG2 | qPCR | 5.85 | 3.97 | 3.32 | 5.62 | 8 | 16.75 | 55.01 | 39.76 | 122.41 | 102.37 | 114.02 | 124.09 | 0.003 |
| HepG2 | bDNA | 12.3 | 10.7 | 10.7 | 11.9 | 20.06 | 25 | 69.52 | 57.29 | 112.28 | 98.14 | 142.26 | 148.92 | 0.004 |
| Hep3B | qPCR | 3.17 | 5.52 | 11.7 | 13.8 | 27.68 | 39.58 | 61.21 | 61.87 | 90.51 | 87.56 | 106.03 | 108.72 | 0.006 |
| Hep3B | bDNA | 3.08 | 3.66 | 4.19 | 7.25 | 21.05 | 22.1 | 73.74 | 63.19 | 105.55 | 96.27 | 105.97 | 96.46 | 0.006 |
| Duplex AD-18339 | | | | | | | | | | | | | | |
| HepG2 | qPCR | 6.27 | 7.28 | Nd | 11 | 15.25 | 38.69 | 38.78 | 71.7 | 84.09 | 62.2 | 75.61 | 85.46 | 0.004 |
| HepG2 | bDNA | 15.1 | 8.14 | 5.13 | 6.89 | 12.17 | 32.14 | 42.98 | 64.01 | 60.76 | 79.95 | 81.97 | 95.43 | 0.002 |
| Hep3B | qPCR | 8.3 | 9.47 | 13.2 | 34.5 | 44.54 | 77.38 | 81.04 | 81.41 | 93.95 | 81.04 | 75.61 | 78.28 | 0.018 |
| Hep3B | bDNA | 10.5 | 9.43 | 11.7 | 27.1 | 44.88 | 72.32 | 79.88 | 79.6 | 87.46 | 96.53 | 95.13 | 89.88 | 0.029 |

[0259] A summary of the single dose results for rodent specific TTR-dsRNAs (TTR siRNAs) are presented below in Table 10. Single dose results are expressed as % TTR mRNA relative to control, assayed in rat H.4.II.E cells, after transfection of rodent specific TTR siRNAs at 10 nM. These results show that some rodent specific TTR siRNAs are effective in suppressing endogenous rat TTR mRNA in vitro.

TABLE 10
Single dose results of in vitro screen of
rodent specific TTR-dsRNAs (TTR siRNAs)

| | % Relative to |
|---|---|
| Duplex # | control at 10 nM |
| AD-18529 | 19.83 |
| AD-18530 | 44.49 |
| AD-18531 | 6.01 |
| AD-18532 | 24.06 |
| AD-18533 | 37.78 |
| AD-18534 | 8.19 |
| AD-18535 | 10.18 |
| AD-18536 | 16.13 |
| AD-18537 | 15.88 |
| AD-18538 | 19.93 |
| AD-18539 | 49.24 |
| AD-18540 | 2.99 |
| AD-18541 | 1.32 |
| AD-18542 | 6.3 |
| AD-18543 | 16.46 |
| AD-18544 | 17.55 |
| AD-18545 | 3.53 |
| AD-18546 | 2.75 |
| AD-18547 | 7.01 |
| AD-18548 | 5.02 |
| AD-18549 | 1.61 |
| AD-18550 | 9.58 |
| AD-18551 | 7.74 |
| AD-18552 | 3.74 |
| AD-18553 | 50.39 |
| AD-18554 | 111.06 |

### Example 3. In Vitro Assay of TTR siRNAs for Induction of TNF-α and IFN-α Secretion

[0260] To evaluate potential for immunostimulation, TTR siRNAs were assayed in vitro for induction of TNF-α and IFN-α secretion.

[0261] Human PBMC were isolated from freshly collected buffy coats obtained from healthy donors (Research Blood Components, Inc., Boston, MA) by a standard Ficoll-Hypaque density centrifugation. Freshly isolated cells (1×10⁵/well/100 μl) were seeded in 96-well plates and cultured in RPMI 1640 GlutaMax medium (Invitrogen) supplemented with 10% heat-inactivated fetal bovine serum and 1% antibiotic/antimycotic (Invitrogen).

[0262] siRNAs were transfected into PBMC using DOTAP transfection reagent (Roche Applied Science). The DOTAP was first diluted in Opti-MEM (Invitrogen) for 5 minutes before mixing with an equal volume of Opti-MEM containing the siRNA. siRNA/DOTAP complexes were incubated as specified by the manufacturer's instructions and subsequently added to PBMC (50 μl/well) which were then cultured for 24 hours. Positive and negative control siRNAs were included in all assays. AD-5048 was used as a positive control siRNA. AD-5048 corresponds to a sequence that targets human Apolipoprotein B (Soutschek et al., 2004) and elicits secretion of both IFN-α and TNF-α in this assay. AD-1955, which does not elicit IFN-α and TNF-α secretion in this assay, was used as a negative control siRNA. All siRNAs were used at a final concentration of 133 nM. The ratio of RNA to transfection reagent was 16.5 pmoles per μg of DOTAP.

[0263] Cytokines were detected and quantified in culture supernatants with a commercially available ELISA kit for IFN-α (BMS216INST) and TNF-α (BMS223INST), both from Bender MedSystems (Vienna, Austria). TTR siRNA cytokine induction is expressed as percent IFN-α or TNF-α produced relative to the positive control siRNA AD-5048.

[0264] IFN-α and TNF-α stimulation results for a number of TTR siRNAs are presented in FIG. 1 (mean of quadruplicate wells±SD) and below in Table 11 (percentage compared with AD-5048). None of the TTR siRNAs evaluated induced significant TNF-α or IFN-α secretion by cultured human PBMCs.

TABLE 11
IFN-α and TNF-α stimulation results for TTR siRNAs

| | IFN-α | TNF-α |
|---|---|---|
| Duplex # | (% of AD-5048) | (% of AD-5048) |
| AD-18246 | 0 | 4 |
| AD-18258 | 0 | 0 |
| AD-18259 | 0 | 0 |
| AD-18261 | 0 | 0 |
| AD-18263 | 0 | 0 |
| AD-18271 | 0 | 0 |
| AD-18274 | 2 | 1 |
| AD-18275 | 0 | 0 |
| AD-18276 | 0 | 0 |
| AD-18277 | 0 | 0 |
| AD-18285 | 0 | 0 |
| AD-18290 | 0 | 0 |
| AD-18291 | 0 | 0 |
| AD-18292 | 0 | 0 |
| AD-18293 | 0 | 0 |
| AD-18298 | 0 | 0 |
| AD-18299 | 0 | 0 |
| AD-18320 | 0 | 0 |
| AD-18321 | 0 | 0 |
| AD-18323 | 0 | 0 |
| AD-18324 | 0 | 0 |
| AD-18325 | 0 | 0 |
| AD-18326 | 0 | 0 |
| AD-18327 | 0 | 0 |
| AD-18328 | 0 | 0 |
| AD-18330 | 0 | 0 |
| AD-18332 | 1 | 0 |
| AD-18333 | 0 | 1 |
| AD-18334 | 0 | 1 |
| AD-18336 | 1 | 0 |
| AD-18339 | 0 | 0 |
| AD-18340 | 0 | 0 |
| AD-18342 | 0 | 0 |
| AD-18343 | 0 | 0 |
| AD-18345 | 0 | 0 |
| AD-18353 | 0 | 0 |
| AD-18448 | 0 | 0 |
| AD-18456 | 0 | 0 |
| AD-18457 | 0 | 0 |
| AD-18458 | 0 | 0 |
| AD-18459 | 0 | 0 |

[0265] The five lead TTR targeting dsRNAs (TTR siRNAs) were selected based on IC50s in the pM range in the human hepatocyte cell lines HepG2 and Hep3B, and the absence of immunostimulatory activity. Duplexes without any mismatches are more likely to achieve significant knockdown of the target transcript than duplexes with mismatches between the oligo and the mRNA. To better enable interpretation of cross-species toxicology data and to have the broadest applicability to human patients, duplexes that have 100% identity in orthologous genes from rat, cynomolgus monkey and human, and that do not target regions with known polymorphisms are generally preferred. The five lead compounds were selected based on IC50 in hepatocyte cell lines in the pM range, the absence of immunostimulatory activity, specificity to the human TTR transcripts, and absence of known polymorphisms (mutations) in the region of the mRNA targeted by the duplex. In the case of TTR, no 19 base oligos were found with complete identity in human, rat and cynomolgus monkey. A summary of these data are presented in Table 12, which also includes information on known TTR mutations in the region targeted by the duplex and cross-species reactivity.

TABLE 12
Summary of data for five most potent TTR dsRNAs.

| | IC50 (qPCR): | IC50 (bDNA): | | Mutations | Cross-species |
|---|---|---|---|---|---|
| Duplex # | nM HepG2 | nM HepG2 | IFNa/TNFa | not covered | reactivity |
| AD-18258 | 0.007 | 0.005 | Negative | None | Cyno: 1 mismatch @ |
| | | | | (non-coding | position 14 A to G |
| | | | | region) | Rat: no homology at |
| | | | | | any position |
| AD-18274 | 0.009 | 0.176 | Negative | Lys70Asn; | Cyno: no mismatch |
| | | | | Val71Ala; | Rat: no homology at |
| | | | | Ile73Val; | any position |
| | | | | Asp74His | |
| AD-18324 | 0.002 | 0.006 | Negative | None | Cyno: no mismatch |
| | | | | (non-coding | Rat: no homology at |
| | | | | region) | any position |
| AD-18328 | 0.003 | 0.004 | Negative | None | Cyno: no mismatch |
| | | | | (non-coding | Rat: 7 mismatches |
| | | | | region) | |
| AD-18339 | 0.004 | 0.002 | Negative | None | None |
| | | | | (non-coding | |
| | | | | region) | |

### Example 4. In Vivo Reduction of Liver TTR mRNA and Plasma TTR Protein by LNP01-18324, LNP01-18328 and LNP01-18246 in Transgenic Mice

[0266] Two TTR siRNAs, AD-18324 and AD-18328, were chosen for in vivo evaluation. These duplexes exhibited potent dose-dependent silencing in vitro in hepatocyte cell lines (e.g. HepG2). FIG. 2A and FIG. 2B show the dose responses in HepG2 cells after transfection with AD-18324 (FIG. 2A) or AD-18328 (FIG. 2B) where the doses are expressed in nM on the x-axis and the responses are expressed as fraction TTR mRNA remaining relative to control, on the y-axis. In HepG2 cells, the IC50s of AD-18324 and AD-18328 were determined to be 2 pM and 3 pM, respectively. The TTR target sites for both lead dsRNA candidates are in the 3′ untranslated region of the TTR mRNA, in a region where there are no reported mutations in the literature.

[0267] The sequences of each strand of the two lead candidates are reproduced below from the Tables. Strand: s=sense; as=antisense; Position: position of 5′ base on transcript NM_000371.2.

| | | | | | SEQ |
|---|---|---|---|---|---|
| Duplex | | Oligo | Po- | Sequence | ID |
| # | Strand | # | sition* | 5′ to 3′ | NO: |
| AD-18324 | s | A-32337 | 509 | GGAuuucAuGuA | 1001 |
| | | | | AccAAGAdTdT | |
| AD-18324 | as | A-32338 | 527 | UCUUGGUuAcAU | 1002 |
| | | | | GAAAUCCdTdT | |
| AD-18328 | s | A-32345 | 518 | GuAAccAAGAGu | 1009 |
| | | | | AuuccAudTdT | |
| AD-18328 | as | A-32346 | 536 | AUGGAAuACUCU | 1010 |
| | | | | UGGUuACdTdT | |

[0268] In addition, a rodent cross-reactive TTR dsRNA, AD-18246, was chosen for further evaluation in vivo. AD-18246 targets a sequence beginning at position 88 of the open reading frame, where there are three mutations reported in the literature. A dose response curve for AD-18246 in HepG2 cells is shown in FIG. 3. AD-18246 is substantially less potent than AD-18324 and AD-18328; the IC50 of AD-18246 was determined to be 265 pM.

[0269] AD-18324, AD-18328, and AD-18246 were administered to transgenic mice after formulation in LNP01. 3-5 month old H129-mTTR-KO/iNOS-KO/hTTR transgenic mice (mouse transthyretin knock-out/inducible nitric oxide synthase knock-out/human transthyretin transgenic) were intravenously (IV) administered 200 μl of LNP01-formulated transthyretin-specific siRNA (AD-18324, AD-18328, or AD-18246), LNP01-formulated control siRNA targeting the non-mammalian luciferase gene (AD-1955) or PBS via the tail vein at concentrations of 1.0 mg/kg, 3.0 mg/kg, or 6.0 mg/kg for siRNAs AD-18324 and AD-18328, 3.0 mg/kg for siRNA AD-18246, and 6.0 mg/kg for siRNA AD-1955. LNP01 is a lipidoid formulation comprised of ND98, Cholesterol, and PEG-Ceramide C16.

[0270] After approximately forty-hours, mice were anesthetized with 200 μl of ketamine, and then exsanguinated by severing the right caudal artery. Whole blood was isolated and plasma was isolated and stored at −80° C. until assaying. Liver tissue was collected, flash-frozen and stored at −80° C. until processing.

[0271] Efficacy of treatment was evaluated by (i) measurement of TTR mRNA in liver at 48 hours post-dose, and (ii) measurement of TTR protein in plasma at prebleed and at 48 hours post-dose. TTR liver mRNA levels were assayed utilizing the Branched DNA assays-QuantiGene 2.0 (Panomics cat #: QS0011). Briefly, mouse liver samples were ground and tissue lysates were prepared. Liver lysis mixture (a mixture of 1 volume of lysis mixture, 2 volume of nuclease-free water and 10 μl of Proteinase-K/ml for a final concentration of 20 mg/ml) was incubated at 65° C. for 35 minutes. 20 μl of Working Probe Set (TTR probe for gene target and GAPDH for endogenous control) and 80 ul of tissue-lysate were then added into the Capture Plate. Capture Plates were incubated at 55° C.±1° C. (aprx. 16-20 hrs). The next day, the Capture Plate were washed 3 times with 1× Wash Buffer (nuclease-free water, Buffer Component 1 and Wash Buffer Component 2), then dried by centrifuging for 1 minute at 240 g. 100 ul of pre-Amplifier Working Reagent was added into the Capture Plate, which was sealed with aluminum foil and incubated for 1 hour at 55° C.±1° C. Following 1 hour incubation, the wash step was repeated, then 100 μl of Amplifier Working Reagent was added. After 1 hour, the wash and dry steps were repeated, and 100 μl of Label Probe was added. Capture plates were incubated 50° C.±1° C. for 1 hour. The plate was then washed with 1× Wash Buffer, dried and 100 μl Substrate was added into the Capture Plate. Capture Plates were read using the SpectraMax Luminometer following a 5 to 15 minute incubation. bDNA data were analyzed by subtracting the average background from each triplicate sample, averaging the resultant triplicate GAPDH (control probe) and TTR (experimental probe) values, and then computing the ratio: (experimental probe-background)/(control probe-background).

[0272] TTR plasma levels were assayed utilizing the commercially available kit “AssayMax Human Prealbumin ELISA Kit” (AssayPro, St. Charles, MO, Catalog #EP3010-1) according to manufacturer's guidelines. Briefly, mouse plasma was diluted 1:10,000 in 1× mix diluents and added to pre-coated plates along with kit standards, and incubated for 2 hours at room temperature followed by 5× washes with kit wash buffer. Fifty microliters of biotinylated prealbumin antibody was added to each well and incubated for 1 hr at room temperature, followed by 5× washes with wash buffer. Fifty microliters of streptavidin-peroxidase conjugate was added to each well and plates were incubated for 30 minutes at room temperature followed by washing as previously described. The reaction was developed by the addition of 50 μl/well of chromogen substrate and incubation for 10 minutes at room temperature with stopping of reaction by the addition of 50 μl/well of stop solution. Absorbance at 450 nm was read on a Versamax microplate reader (Molecular Devices, Sunnyvale, CA) and data were analyzed utilizing the Softmax 4.6 software package (Molecular Devices).

[0273] LNP01-18324 and LNP01-18328 were found to reduce liver TTR mRNA (FIG. 4A) and plasma TTR protein (FIG. 4B) levels in a dose-dependent manner with IV bolus administration. The mRNA ED50 of LNP01-18328 was determined to be ˜1 mg/kg whereas the ED50 of LNP01-18324 was determined to be ˜2 mg/kg. The effects of LNP01-18324 and LNP01-18328 were specific, because the control, LNP01-1955 at 6 mg/kg, did not significantly affect liver TTR mRNA levels, as compared with the PBS group. LNP01-18324 and LNP01-18328 reduced plasma TTR protein levels relative to the PBS group, with potencies that were similar to those on TTR mRNA levels. At 3 mg/kg, LNP01-18246 reduced liver TTR mRNA levels to a lessor extent than 3 mg/kg LNP01-18324 or LNP01-18328.

[0274] These results demonstrate that LNP01-18324 and LNP01-18328, administered by IV bolus, substantially reduce human TTR mRNA expressed by the transgenic mouse liver, which results in reduction of human TTR protein in the circulation.

### Example 5. In Vivo Reduction of Wild-Type TTR mRNA in the Non-Human Primate Liver by SNALP-18324 and SNALP-18328

[0275] To evaluate the efficacy of TTR siRNAs AD-18324 and AD-18328 in non-human primates on liver TTR mRNA levels, the siRNAs were formulated in SNALP and administered by 15-minute IV infusion. Cynomolgus monkeys (Macaca fascicularis) (2 to 5 kg, 3 animals per group) were administered 15-minute IV infusions of SNALP-18324 (0.3, 1.0 or 3.0 mg/kg), SNALP-18328 (0.3, 1 or 3 mg/kg), or SNALP-1955 (3 mg/kg, with negative control siRNA AD-1955 which targets the non-mammalian gene luciferase). At forty-eight hours post-dosing, monkeys were anesthetized with sodium pentobarbital and exsanguinated. Liver tissue for TTR mRNA determination was collected, flash-frozen, and stored at −80° C. until processing.

[0276] TTR mRNA levels in the liver were assayed utilizing a custom designed Branched DNA assay, utilizing the QuantiGene1.0 technology. Briefly, monkey liver samples were ground and tissue lysates were prepared. Liver lysis mixture (1 volume lysis mixture, 2 volume nuclease-free water, and 10 μl of Proteinase-K/ml for a final concentration of 20 mg/ml) was incubated at 65° C. for 35 minutes. 20 μl Working Probe Set (TTR probe for gene target and GAPDH for endogenous control) and 80 μl tissue-lysate were then added into the Capture Plate. Capture Plates were incubated at 55° C.±1° C. (approx. 16-20 hrs). The next day, the Capture Plates were washed three times with 1× Wash Buffer (nuclease-free water, Buffer Component 1 and Wash Buffer Component 2), then dried by centrifuging for 1 minute at 240 g. 100 μl of pre-Amplifier Working Reagent was added into the Capture Plate, which was sealed with aluminum foil and incubated for 1 hour at 55° C.±1° C. Following a 1-hour incubation, the wash step was repeated, and then 100 μl Amplifier Working Reagent was added. After 1 hour, the wash and dry steps were repeated, and 100 μl Label Probe was added. Capture plates were incubated 50° C.±1° C. for 1 hour. The plates were then washed with 1× Wash Buffer and dried, and then 100 μl Substrate was added into the Capture Plate. Capture Plates were read using the SpectraMax Luminometer following a 5 to 15 minute incubation. bDNA data were analyzed by (i) subtracting the average background from each triplicate sample, (ii) averaging the resultant GAPDH (control probe) and TTR (experimental probe) values, and then (iii) taking the ratio: (experimental probe-background)/(control probe-background).

[0277] The results are shown in FIG. 5. SNALP-18324 and SNALP-18328 reduced TTR mRNA levels in the liver in a dose-dependent manner, compared to the negative control SNALP-1955. The mRNA ED50s of SNALP-18328 and SNALP-18324 were determined to be ˜0.3 and ˜1 mg/kg, respectively.

[0278] These results demonstrate that SNALP-18324 and SNALP-18328 are effective in suppressing wild-type TTR mRNA in non-human primate liver when administered by IV infusion.

### Example 6. In Vivo Reduction of Mutant (V30M) TTR mRNA and Protein by SNALP-18328 in the Transgenic Mouse

[0279] To evaluate the efficacy of TTR siRNA AD-18328 on mutant (V30M) TTR mRNA in the liver and mutant (V30M) TTR protein in the serum, AD-18328 was formulated in SNALP and administered by IV bolus to V30M hTTR transgenic mice. 8 to 12-week old V30M hTTR transgenic mice (5 animals/group) were intravenously (IV) administered 200 μl SNALP-18328 (0.03, 0.3 or 3 mg/kg), SNALP-1955 (3 mg/kg, with negative control siRNA AD-1955 which targets the non-mammalian gene luciferase), or PBS. Mice used were the Mus musculus strain H129-hTTR KO from Institute of Molecular and Cellular Biology, Porto, Portugal. Briefly, hTTR H129 transgenic mice were crossed with a H129 endogenous TTR KO mice (null mice to generate the H129-hTTR transgenic mice, in a null mouse TTR background (Maeda, S., (2003), Use of genetically altered mice to study the role of serum amyloid P component in amyloid deposition. Amyloid Suppl. 1, 17-20.).

[0280] At 48 hrs post-injection, animals in all five treatment groups were given a lethal dose of ketamine/xylazine. Serum samples were collected and stored at −80° C. until analysis. Liver tissue was collected, flash-frozen and stored at −80° C. until processing.

[0281] For TTR mRNA quantitation, frozen liver tissue was ground into powder, and lysates were prepared. TTR mRNA levels relative to those of GAPDH mRNA were determined in the lysates by using a branched DNA assay (QuantiGene Reagent System, Panomics, Fremont, CA). Briefly, the QuantiGene assay (Genospectra) was used to quantify mRNA levels in tissue sample lysates according to the manufacturer's instructions. The mean level of TTR mRNA was normalized to the mean level of GAPDH mRNA for each sample. Group means of the normalized values were then further normalized to the mean value for the PBS treated group, to obtain the relative level of TTR mRNA expression.

[0282] For TTR protein quantitation, serum was assayed using the AssayPro (St. Charles, MO) Assaymax PreAlbumin ELISA Kit according to the manufacturer's protocol.

[0283] The results are shown in FIG. 6A and FIG. 6B for liver mRNA and serum protein, respectively. SNALP-18328 treated V30M hTTR transgenic mice had a dose-dependent and significant decrease in liver TTR mRNA levels relative to the PBS control group, reaching a maximum reduction of 97% (p<0.001) at 3 mg/kg SNALP-18328, and a 50% reduction (ED50) at ˜0.15 mg/kg SNALP-18328. Serum TTR protein was also suppressed in a dose-dependent manner, with a maximum reduction of serum TTR protein of 99% (p<0.01) (relative to pre-dose levels) at 3 mg/kg SNALP-18328, consistent with the reduction in TTR mRNA levels. SNALP-1955 at 3 mg/kg did not have a statistically significant effect on either TTR mRNA or protein levels, compared to PBS.

[0284] These results demonstrate that SNALP-18328, when administered IV, is active in suppressing mutant V30M TTR mRNA in the transgenic mouse liver, which results in reduction of mutant V30M TTR protein in the circulation.

### Example 7. Durability of TTR mRNA and Protein Suppression by SNALP-18328 in the Transgenic Mouse

[0285] To evaluate the durability of TTR mRNA and protein suppression by SNALP-18328, AD-18328 was formulated in SNALP and administered by IV bolus to V30M hTTR transgenic mice. At various timepoints post-dose, liver TTR mRNA levels and serum TTR protein levels were quantified. 8- to 12-week old V30M hTTR transgenic mice (4 animals/group) were intravenously (IV) administered 200 μl SNALP-18328 (1 mg/kg) or SNALP-1955 (1 mg/kg, with negative control siRNA AD-1955 which targets the non-mammalian gene luciferase). Mice used were Mus musculus strain H129-hTTR KO from Institute of Molecular and Cellular Biology, Porto, Portugal. Briefly, hTTR H129 transgenic mice were crossed with a H129 endogenous TTR KO mice (null mice to generate the H129-hTTR transgenic mice, in a null mouse TTR background (Maeda, S., (2003), Use of genetically altered mice to study the role of serum amyloid P component in amyloid deposition. Amyloid Suppl. 1, 17-20). Days 3, 8, 15, or 22 post-dose, animals in both treatment groups were given a lethal dose of ketamine/xylazine. Serum samples were collected and stored at −80° C. until analysis. Liver tissue was collected, flash-frozen and stored at −80° C. until processing.

[0286] For TTR mRNA quantitation, frozen liver tissue was ground into powder, and lysates were prepared. TTR mRNA levels relative to those of GAPDH mRNA were determined in the lysates by using a branched DNA assay (QuantiGene Reagent System, Panomics, Fremont, CA). Briefly, the QuantiGene assay (Genospectra) was used to quantify mRNA levels in tissue sample lysates according to the manufacturer's instructions. The mean level of TTR mRNA was normalized to the mean level of GAPDH mRNA for each sample. Group means of the normalized values were then further normalized to the mean value for the PBS treated group, to obtain the relative level of TTR mRNA expression.

[0287] For TTR protein quantitation, serum was assayed using the AssayPro (St. Charles, MO) Assaymax PreAlbumin ELISA Kit according to the manufacturer's protocol.

[0288] The results are shown in FIG. 7A and FIG. 7B for liver mRNA and serum protein, respectively. A single IV bolus administration of SNALP-18328 in the hTTR V30M transgenic mouse resulted in durable inhibition of TTR mRNA levels in the liver and TTR protein levels in the serum. Compared to the control group (1 mg/ml SNALP-1955), a single IV administration of SNALP-18328 at 1 mg/kg significantly reduced relative TTR mRNA levels on Days 3, 8, 15 and 22 post-dose by 96% (p<0.001), 90% (p<0.001), 82% (p<0.001) and 73% (p<0.001), respectively, and did not return to baseline levels at termination of the study (Day 22 post-dose). Protein levels also decreased with a maximum reduction of serum TTR of 97% (p<0.001) (relative to SNALP-1955) at Day 3 post-dose. At Days 8, 15, and 22 post-dose, TTR protein levels were suppressed by 72% (p<0.05), 32% (p<0.05), and 40% (p<0.001), respectively, relative to SNALP-1955.

[0289] These results demonstrate that a single IV administration of SNALP-18328 produces durable suppression of target liver mRNA and serum protein levels in the V30M hTTR transgenic mouse, with significant reductions of both liver TTR mRNA and serum TTR protein at 22 days post-dose.

### Example 8. Durability of Serum TTR Protein Suppression by SNALP-18328 in the Non-Human Primate

[0290] To evaluate the durability of serum TTR protein suppression by SNALP-18328, AD-18328 was formulated in SNALP and administered by IV infusion to non-human primates. At various timepoints post-dose, serum TTR protein levels were quantified.

[0291] Cynomolgus monkeys (Macaca fascicularis) (n=5 animals/group for SNALP-18328 groups and n=3 animals/group for SNALP-1955 and PBS groups) were administered a 15-minute IV infusion of SNALP-18328 (0.3, 1 or 3 mg/kg), SNALP-1955 (3 mg/kg) with negative control siRNA AD-1955 which targets the non-mammalian gene luciferase), or PBS. At Days 0, 1, 2, 3, 4, 5, 7, 10, and 14 of the dosing phase, serum samples were collected and stored at −80° C. until analysis.

[0292] Western blot analysis was used to evaluate TTR protein levels in serum samples. Serum samples from each group were pooled and diluted 1:1 with Laemmli sample buffer (β-mercaptoethanol was added at a 1:20 dilution). The samples were heated at 95° C. for 10 minutes. 12.5 μl of each sample was loaded in each lane of a 10-20% Criterion (Biorad, Hercules, CA) prep gel and separated by SDS-PAGE at 120V for 1.5 hrs, then transferred to a nitrocellulose membrane using a semi-dry system at 15V for 1 hour. The membrane was blocked overnight at 4° C. in LiCOR (Lincoln, NE) blocking buffer diluted 1:1 with 1×PBS. The blot was probed first with primary antibodies (goat anti-TTR from Santa Cruz (Santa Cruz, CA) at a dilution of 1:1000 diluted in LiCOR blocking buffer/PBS on a rocker for 1 hr at room temperature. Blots were washed 4× with PBS+0.2% Tween 20 (10 minutes per wash). The fluorescent labeled secondary antibodies (anti-goat 680 nm from Invitrogen (Carlsbad, CA) were added at a dilution of 1:10,000 in LiCOR blocking buffer/PBS and the blot was incubated for 1 hour at room temperature. After incubation, blots were washed 4× with PBS+0.2% Tween 20 followed by one wash with 1×PBS. The Li-COR's Odyssey Infrared Imaging System was used to detect the protein bands. TTR monomer migrates at 15 kDa.

[0293] The results are shown in FIG. 8. Serum TTR protein levels showed a dose-dependent reduction with 1 or 3 mg/kg SNALP-18328, as compared to pre-dose (Day 0) levels. The duration of suppression, following a single IV administration of SNALP-18328 is at least 14 days after 1 or 3 mg/kg SNALP-18328 treatment.

[0294] These results demonstrate that a single IV administration of SNALP-18328 produces durable suppression of TTR protein in the circulation in the non-human primate (Macaca fascicularis), with significant reduction of TTR protein at 14 days post-dose.

### Example 9: In Vivo Reduction of Mutant (V30M) TTR in Peripheral Tissues by SNALP-18328 in the Transgenic Mouse

[0295] To evaluate the efficacy of SNALP-18328 in reducing TTR in peripheral tissues, hTTR V30M/HSF-1 knock-out mice were evaluated with immunohistochemical staining for TTR. Two-month old hTTR V30M/HSF-1 knock-out mice (Maeda, S., (2003), Use of genetically altered mice to study the role of serum amyloid P component in amyloid deposition. Amyloid Suppl. 1, 17-20) were administered an IV bolus of 3 mg/kg SNALP-18328 (12 animals), 3 mg/kg SNALP-1955 (with negative control siRNA AD-1955 which targets the non-mammalian gene luciferase, 4 animals), or PBS (4 animals) once every two weeks for a total of four doses on days 0, 14, 28, and 42. TTR liver mRNA levels and TTR-immunoreactivity in multiple peripheral tissues were evaluated at 8 weeks post-first dose on day 56.

[0296] Mice were anesthetised with 1 mg/kg medetomidine, and given a lethal dose of ketamine. Tissues and organs of interest were collected. For immunohistochemistry, esophagus (E), stomach(S), intestine (duodenum (I1) and colon (14)), nerve (N) and dorsal root ganglia (D) were fixed in neutral buffered formalin and embedded in paraffin. For TTR detection, rabbit anti-human TTR primary antibody (1:1000, DAKO, Denmark), and anti-rabbit biotin-conjugated secondary antibody (1:20 Sigma, USA) were followed by extravidin labelling (1:20, Sigma, USA) in order to stain for the TTR protein. The reaction was developed with 3-amino-9-ethyl carbaxole, AEC (Sigma, USA). Semi-quantitative analysis of immunohistochemical slides was performed using Scion image quant program that measures the area occupied by the substrate reaction color and normalizes this value to the total image area. Mean values of % occupied area are displayed with the corresponding standard deviation. Each animal tissue was evaluated in four different areas. The presence of human TTR in parasympathetic ganglia of the stomach and intestine was studied by double immunofluorescent staining with rabbit anti-human TTR (1:1000, DAKO, Denmark) and mouse anti-PGP9.5 (1:40, Serotec, USA) as the primary antibodies; secondary antibodies were, respectively: anti-rabbit Alexa Fluor 488 (Molecular probes, UK) and goat anti-mouse Alexa Fluor 568 (Molecular probes, UK). Slides were mounted with vectashield (Vector) and visualized in a Zeiss Cell Observer System microscope (Carl Zeiss, Germany) equipped with filters for FITC and rhodamine.

[0297] The results are graphed in FIG. 9. In contrast with PBS and SNALP-1955 treated animals, SNALP-18328 treated animals had a significant reduction of TTR-immunoreactivity in all tissues examined (esophagus (E), stomach(S), intestine (duodenum (11) and colon (14)), nerve (N) and dorsal root ganglia (D).

[0298] These results demonstrate that SNALP-18328 administration to hTTR V30M/HSF-1 knock-out mice causes a significant reduction of TTR protein in peripheral tissues and organs, including esophagus, stomach, intestine (duodenum and colon), nerve, and dorsal root ganglion.

### Example 10. In Vivo Reduction of Wild-Type TTR mRNA in the Non-Human Primate Liver by XTC-SNALP-18328

[0299] To evaluate the efficacy of the novel lipid nanoparticle formulation XTC-SNALP for delivery of siRNA in non-human primate, TTR siRNA AD-18328 was formulated in XTC-SNALP (XTC-SNALP-18328) and administered by 15-minute IV infusion, and liver TTR mRNA was quantified. Cynomolgus monkeys (Macaca fascicularis) were administered 15-minute IV infusions of XTC-SNALP-18328 (0.03, 0.1, 0.3 or 1 mg/kg) or XTC-SNALP-1955 (1 mg/kg, with negative control siRNA AD-1955 which targets the non-mammalian gene luciferase). At forty-eight hours post-dosing, monkeys were anesthetized with sodium pentobarbital and exsanguinated. Liver tissue for TTR mRNA determination was collected, flash-frozen, and stored at −80° C. until processing. Methods used for TTR mRNA quantitation in liver tissue were similar to those described in Example 5 above.

[0300] The results are shown in FIG. 10. XTC-SNALP-18328 reduced TTR mRNA levels in the liver in a dose-dependent manner, compared to the negative control XTC-SNALP-1955. The mRNA ED50 was determined to be ˜0.1 mg/kg XTC-SNALP-18328.

[0301] These results demonstrate that XTC-SNALP-18328 is effective in suppressing wild-type TTR mRNA in non-human primate liver when administered by IV infusion.

### Example 11: In Vivo Reduction of Wild-Type TTR mRNA in the Non-Human Primate Liver by LNP09-18328 and LNP11-18328

[0302] To evaluate the efficacy of two novel lipid nanoparticle formulations, LNP09 and LNP11, for delivery of siRNA in non-human primate, TTR siRNA AD-18328 was formulated in LNP09 (LNP09-18328) or LNP11 (LNP11-18328), and administered by 15-minute IV infusion, and liver TTR mRNA and serum TTR protein levels were assayed. Cynomolgus monkeys (Macaca fascicularis) were administered 15-minute IV infusions of LNP09-18328 (0.03, 0.1, or 0.3 mg/kg), LNP11-18328 (0.03, 0.1, or 0.3 mg/kg), or PBS. Liver biopsy samples were collected at 48 hrs post-dosing, flash-frozen, and stored at −80° C. until processing. Serum was collected before dosing (pre-bleed), and on Days 1, 2, 4, 7, 14, 21 and 28 post-dosing and stored at −80° C. until processing. Methods used for TTR mRNA quantitation in liver tissue and serum TTR protein evaluation were similar to those described in Examples 5 and 8 above.

[0303] The results are shown in FIG. 11A for mRNA, and in FIG. 11B and FIG. 11C for protein. LNP09-18328 and LNP11-18328 treated animals showed a dose-dependent decrease in TTR mRNA levels in the liver, reaching a maximum reduction at 0.3 mg/kg of ˜85% (LNP09-18328) and ˜90% (LNP11-18328) mRNA relative to the PBS control. The mRNA ED50 was determined to be ˜0.02 mg/kg for both LNP09-18328 and LNP11-18328. At Day 7 post-dosing, serum samples also exhibited a dose-dependent reduction of TTR protein for 0.1 and 0.3 mg/kg LNP09-18328 and LNP11-18328, compared to PBS control levels. FIG. 11C shows a decrease in TTR protein levels with a 0.3 mg/kg dose of LNP09-18328 that persisted over at least 28 days post-dosing, as compared to the PBS control group and as compared with the pre-bleed samples.

[0304] These results demonstrate that LNP09-18328 and LNP11-18328 are effective in suppressing wild-type TTR mRNA in non-human primate liver and wild-type TTR protein in the circulation, when administered by IV infusion. Furthermore, the suppression with LN09-18328 is durable, persisting for at least 28 days following the IV infusion.

### Example 12. Synthesis of TTR Tiled Sequences

[0305] A set of TTR duplexes (“tiled duplexes”) were designed that targeted the TTR gene near the target region of AD-18328, which targets the human TTR gene starting at nucleotide 628 of NM_000371.3.

[0306] In the examples below, the numbering representing the position of the 5′ base of an siRNA on the transcript is based on NM_000371.3 (FIG. 12; SEQ ID NO:1331). In the examples shown above, the numbering for siRNA targeting human siRNA was based on NM_000371.2 (FIG. 13A). NM_000371.3 extends the sequence of the 5′ UTR by 110 bases compared to NM_000371.2, as shown in FIG. 14. Thus, as an example, the starting position of AD-18328 is 628 on NM_000371.3 and 518 on NM_000371.2 (FIG. 14).

[0307] TTR tiled sequences were synthesized on MerMade 192 synthesizer at 1 umol scale. For all the sequences in the list, ‘endolight’ chemistry was applied as detailed below.
[0308] All pyrimidines (cytosine and uridine) in the sense strand contained 2′-O-Methyl bases (2′ O-Methyl C and 2′-O-Methyl U)
[0309] In the antisense strand, pyrimidines adjacent to (towards 5′ position) ribo A nucleoside were replaced with their corresponding 2-O-Methyl nucleosides
[0310] A two base dTdT extension at 3′ end of both sense and anti sense sequences was introduced
[0311] The sequence file was converted to a text file to make it compatible for loading in the MerMade 192 synthesis software

### Synthesis, Cleavage and Deprotection:

[0312] The synthesis of TTR sequences used solid supported oligonucleotide synthesis using phosphoramidite chemistry. The synthesis of the sequences was performed at 1 um scale in 96 well plates. The amidite solutions were prepared at 0.1M concentration and ethyl thio tetrazole (0.6M in Acetonitrile) was used as activator. The synthesized sequences were cleaved and deprotected in 96 well plates, using methylamine in the first step and fluoride reagent in the second step. The crude sequences were precipitated using acetone:ethanol (80:20) mix and the pellet were re-suspended in 0.2M sodium acetate buffer. Samples from each sequence were analyzed by LC-MS to confirm the identity, UV for quantification and a selected set of samples by IEX chromatography to determine purity.

### Purification and Desalting:

[0313] TTR tiled sequences were purified on AKTA explorer purification system using Source 15Q column. A column temperature of 65 C was maintained during purification. Sample injection and collection was performed in 96 well (1.8 mL-deep well) plates. A single peak corresponding to the full length sequence was collected in the eluent. The purified sequences were desalted on a Sephadex G25 column using AKTA purifier. The desalted TTR sequences were analyzed for concentration (by UV measurement at A260) and purity (by ion exchange HPLC). The single strands were then submitted for annealing.

### TTR Single Strands and Duplexes:

[0314] A detailed list of TTR tiled duplexes and corresponding single strands (sense and antisense) are shown in the table below (Table 13).

TABLE 13
TTR tiled duplexes and corresponding single strands
Strand: s = sense; as = antisense;
Position: position of 5′ base on transcript
(NM_000371.3, SEQ ID NO: 1331).

| | | | | | SEQ |
|---|---|---|---|---|---|
| Duplex # | Position | Oligo # | Strand | Sequence (5′ to 3″) | ID NO: |
| AD-18323 | 618 | A-32335 | S | GGGAuuucAuGuAAccAAGdTdT | 1332 |
| | | A-32336 | AS | CUUGGUuAcAUGAAAUCCCdTdT | 1333 |
| AD-18324 | 619 | A-32337 | S | GGAuuucAuGuAAccAAGAdTdT | 1334 |
| | | A-32338 | AS | UCUUGGUuAcAUGAAAUCCdTdT | 1335 |
| AD-23000 | 620 | A-42927 | S | GAuuucAuGuAAccAAGAGdTdT | 1336 |
| | | A-42928 | AS | CUCUUGGUuAcAUGAAAUCdTdT | 1337 |
| AD-23001 | 621 | A-42929 | S | AuuucAuGuAAccAAGAGudTdT | 1338 |
| | | A-42930 | AS | ACUCUUGGUuAcAUGAAAUdTdT | 1339 |
| AD-23002 | 622 | A-42931 | S | uuucAuGuAAccAAGAGuAdTdT | 1340 |
| | | A-42932 | AS | uACUCUUGGUuAcAUGAAAdTdT | 1341 |
| AD-23003 | 623 | A-42933 | S | uucAuGuAAccAAGAGuAudTdT | 1342 |
| | | A-42934 | AS | AuACUCUUGGUuAcAUGAAdTdT | 1343 |
| AD-18325 | 624 | A-32339 | S | ucAuGuAAccAAGAGuAuudTdT | 1344 |
| | | A-32340 | AS | AAuACUCUUGGUuAcAUGAdTdT | 1345 |
| AD-23004 | 625 | A-42935 | S | cAuGuAAccAAGAGuAuucdTdT | 1346 |
| | | A-42936 | AS | GAAuACUCUUGGUuAcAUGdTdT | 1347 |
| AD-18326 | 626 | A-32341 | S | AuGuAAccAAGAGuAuuccdTdT | 1348 |
| | | A-32342 | AS | GGAAuACUCUUGGUuAcAUdTdT | 1349 |
| AD-18327 | 627 | A-32343 | S | uGuAAccAAGAGuAuuccAdTdT | 1350 |
| | | A-32344 | AS | UGGAAuACUCUUGGUuAcAdTdT | 1351 |
| AD-23005 | 628 | A-42937 | S | uAAccAAGAGuAuuccAuudTdT | 1352 |
| | | A-42938 | AS | AAUGGAAuACUCUUGGUuAdTdT | 1353 |
| AD-23006 | 629 | A-42939 | S | AAccAAGAGuAuuccAuuudTdT | 1354 |
| | | A-42940 | AS | AAAUGGAAuACUCUUGGUUdTdT | 1355 |
| AD-23007 | 631 | A-42941 | S | AccAAGAGuAuuccAuuuudTdT | 1356 |
| | | A-42942 | AS | AAAAUGGAAuACUCUUGGUdTdT | 1357 |
| AD-23008 | 632 | A-42943 | S | ccAAGAGuAuuccAuuuuudTdT | 1358 |
| | | A-42944 | AS | AAAAAUGGAAuACUCUUGGdTdT | 1359 |
| AD-23009 | 633 | A-42945 | S | cAAGAGuAuuccAuuuuuAdTdT | 1360 |
| | | A-42946 | AS | uAAAAAUGGAAuACUCUUGdTdT | 1361 |
| AD-23010 | 634 | A-42947 | S | AAGAGuAuuccAuuuuuAcdTdT | 1362 |
| | | A-42948 | AS | GuAAAAAUGGAAuACUCUUdTdT | 1363 |
| AD-23011 | 635 | A-42949 | S | AGAGuAuuccAuuuuuAcudTdT | 1364 |
| | | A-42950 | AS | AGuAAAAAUGGAAuACUCUdTdT | 1365 |
| AD-23012 | 636 | A-42951 | S | GAGuAuuccAuuuuuAcuAdTdT | 1366 |
| | | A-42952 | AS | uAGuAAAAAUGGAAuACUCdTdT | 1367 |
| AD-23013 | 637 | A-42953 | S | AGuAuuccAuuuuuAcuAAdTdT | 1368 |
| | | A-42954 | AS | UuAGuAAAAAUGGAAuACUdTdT | 1369 |
| AD-23014 | 638 | A-42955 | S | GuAuuccAuuuuuAcuAAAdTdT | 1370 |
| | | A-42956 | AS | UUuAGuAAAAAUGGAAuACdTdT | 1371 |
| AD-23015 | 639 | A-42957 | S | uAuuccAuuuuuAcuAAAGdTdT | 1372 |
| | | A-42958 | AS | CUUuAGuAAAAAUGGAAuAdTdT | 1373 |
| AD-23016 | 640 | A-42959 | S | AuuccAuuuuuAcuAAAGcdTdT | 1374 |
| | | A-42960 | AS | GCUUuAGuAAAAAUGGAAUdTdT | 1375 |
| AD-23017 | 641 | A-42961 | S | uuccAuuuuuAcuAAAGcAdTdT | 1376 |
| | | A-42962 | AS | UGCUUuAGuAAAAAUGGAAdTdT | 1377 |
| AD-23018 | 642 | A-42963 | S | uccAuuuuuAcuAAAGcAGdTdT | 1378 |
| | | A-42964 | AS | CUGCUUuAGuAAAAAUGGAdTdT | 1379 |
| AD-23019 | 643 | A-42965 | S | ccAuuuuuAcuAAAGcAGudTdT | 1380 |
| | | A-42966 | AS | ACUGCUUuAGuAAAAAUGGdTdT | 1381 |
| AD-23020 | 644 | A-42967 | S | cAuuuuuAcuAAAGcAGuGdTdT | 1382 |
| | | A-42968 | AS | cACUGCUUuAGuAAAAAUGdTdT | 1383 |
| AD-23021 | 645 | A-42969 | S | AuuuuuAcuAAAGcAGuGudTdT | 1384 |
| | | A-42970 | AS | AcACUGCUUuAGuAAAAAUdTdT | 1385 |
| AD-23022 | 646 | A-42971 | S | uuuuuAcuAAAGcAGuGuudTdT | 1386 |
| | | A-42972 | AS | AAcACUGCUUuAGuAAAAAdTdT | 1387 |
| AD-23023 | 647 | A-42973 | S | uuuuAcuAAAGcAGuGuuudTdT | 1388 |
| | | A-42974 | AS | AAAcACUGCUUuAGuAAAAdTdT | 1389 |
| AD-23024 | 648 | A-42975 | S | uuuAcuAAAGcAGuGuuuudTdT | 1390 |
| | | A-42976 | AS | AAAAcACUGCUUuAGuAAAdTdT | 1391 |
| AD-23025 | 649 | A-42977 | S | uuAcuAAAGcAGuGuuuucdTdT | 1392 |
| | | A-42978 | AS | GAAAAcACUGCUUuAGuAAdTdT | 1393 |
| AD-23026 | 650 | A-42979 | S | uAcuAAAGcAGuGuuuucAdTdT | 1394 |
| | | A-42980 | AS | UGAAAAcACUGCUUuAGuAdTdT | 1395 |
| AD-23027 | 651 | A-42981 | S | AcuAAAGcAGuGuuuucAcdTdT | 1396 |
| | | A-42982 | AS | GUGAAAAcACUGCUUuAGUdTdT | 1397 |
| AD-23028 | 652 | A-42983 | S | cuAAAGcAGuGuuuucAccdTdT | 1398 |
| | | A-42984 | AS | GGUGAAAAcACUGCUUuAGdTdT | 1399 |
| AD-18330 | 653 | A-32349 | S | uAAAGcAGuGuuuucAccudTdT | 1400 |
| | | A-32350 | AS | AGGUGAAAAcACUGCUUuAdTdT | 1401 |
| AD-23029 | 654 | A-42985 | S | AAAGcAGuGuuuucAccucdTdT | 1402 |
| | | A-42986 | AS | GAGGUGAAAAcACUGCUUUdTdT | 1403 |
| AD-23030 | 655 | A-42987 | S | AAGcAGuGuuuucAccucAdTdT | 1404 |
| | | A-42988 | AS | UGAGGUGAAAAcACUGCUUdTdT | 1405 |
| AD-23031 | 656 | A-42989 | S | AGcAGuGuuuucAccucAudTdT | 1406 |
| | | A-42990 | AS | AUGAGGUGAAAAcACUGCUdTdT | 1407 |
| AD-18328 | 628 | A-32345 | S | GuAAccAAGAGuAuuccAudTdT | 1408 |
| | | A-32346 | AS | AUGGAAuACUCUUGGUuACdTdT | 1409 |

### Example 13. In Vitro Screening of TTR Tiled siRNAs

[0315] Tiled TTR duplexes were assayed in Hep3B cells for inhibition of endogenous TTR expression using real time PCR assays.

[0316] Cell culture and transfection: Hep3B cells (ATCC, Manassas, VA) were grown to near confluence at 37° C. in an atmosphere of 5% CO₂ in Eagle's Minimum Essential Medium (EMEM, ATCC) supplemented with 10% FBS, streptomycin, and glutamine (ATCC) before being released from the plate by trypsinization. Reverse transfection was carried out by adding 5 μl of Opti-MEM to 5 μl of each siRNA in individual wells of a 96-well plate. To this 10 μl of Opti-MEM plus 0.2 μl of Lipofectamine RNAiMax was added per well (Invitrogen, Carlsbad CA. cat #13778-150) and the mixture was incubated at room temperature for 15 minutes. 80 μl of complete growth media described above, but without antibiotic containing 2.0×10⁴ Hep3B cells were then added. Cells were incubated for 24 hours prior to RNA purification. Experiments were performed at 0.1 or 10 nM final duplex concentration.

[0317] Total RNA isolation using MagMAX-96 Total RNA Isolation Kit (Applied Biosystems, Foster City CA, part #: AM1830): Cells were harvested and lysed in 140 μl of Lysis/Binding Solution then mixed for 1 minute at 850 rpm using and Eppendorf Thermomixer (the mixing speed was the same throughout the process). Twenty micro liters of magnetic beads and Lysis/Binding Enhancer mixture were added into cell-lysate and mixed for 5 minutes. Magnetic beads were captured using magnetic stand and the supernatant was removed without disturbing the beads. After removing supernatant, magnetic beads were washed with Wash Solution 1 (isopropanol added) and mixed for 1 minute. Beads were capture again and supernatant removed. Beads were then washed with 150 μl Wash Solution 2 (Ethanol added), captured and supernatant was removed. 50 μl of DNase mixture (MagMax turbo DNase Buffer and Turbo DNase) was then added to the beads and they were mixed for 10 to 15 minutes. After mixing, 100 μl of RNA Rebinding Solution was added and mixed for 3 minutes. Supernatant was removed and magnetic beads were washed again with 150 μl Wash Solution 2 and mixed for 1 minute and supernatant was removed completely. The magnetic beads were mixed for 2 minutes to dry before RNA was eluted with 50 μl of water.

[0318] cDNA synthesis using ABI High capacity cDNA reverse transcription kit (Applied Biosystems, Foster City, CA, Cat #4368813): A master mix of 2 μl 10× Buffer, 0.8 μl 25× dNTPs, 2 μl Random primers, 1 μl Reverse Transcriptase, 1 μl RNase inhibitor and 3.2 μl of H2O per reaction were added into 10 μl total RNA. cDNA was generated using a Bio-Rad C-1000 or S-1000 thermal cycler (Hercules, CA) through the following steps: 25° C. 10 min, 37° C. 120 min, 85° C. 5 sec, 4° C. hold.

[0319] Real time PCR: 2 μl of cDNA were added to a master mix containing 0.5 μl GAPDH TaqMan Probe (Applied Biosystems Cat #4326317E), 0.5 μl TTR TaqMan probe (Applied Biosystems cat #HS00174914 M1) and 10 μl Roche Probes Master Mix (Roche Cat #04887301001) per well in a LightCycler 480 384 well plate (Roche cat #0472974001). Real time PCR was done in a LightCycler 480 Real Time PCR machine (Roche). Each duplex was tested in two independent transfections and each transfection was assayed in duplicate.

[0320] Real time data were analyzed using the ΔΔCt method. Each sample was normalized to GAPDH expression and knockdown was assessed relative to cells transfected with the non-targeting duplex AD-1955. Table 14 shows the knockdown of TTR using the siRNAs. Data are expressed as the percent of message remaining relative to cells targeted with AD-1955.

[0321] Many but not all tiled TTR-dsRNAs, targeting TTR near the target of AD-18328, reduced TTR mRNA by at least 70% when transfected into Hep3B cells at 0.1 nM.

TABLE 14
Inhibition of TTR by tiled dsRNA targeting
TTR near target of AD-18328.

| | % message | % SD | % message | % SD |
|---|---|---|---|---|
| Duplex # | remaining 0.1 nM | 0.1 nM | remaining 10 nM | 10 nM |
| AD-18323 | 6.7 | 1.90 | 1.7 | 0.02 |
| AD-18324 | 1.8 | 0.58 | 0.9 | 0.10 |
| AD-23000 | 5.5 | 0.93 | 2.1 | 0.87 |
| AD-23001 | 15.2 | 4.89 | 4.9 | 1.74 |
| AD-23002 | 3.1 | 1.12 | 1.4 | 0.55 |
| AD-23003 | 17.3 | 3.13 | 1.7 | 0.06 |
| AD-18325 | 1.5 | 0.27 | 1.4 | 0.66 |
| AD-23004 | 9.0 | 0.15 | 10.5 | 0.96 |
| AD-18326 | 22.0 | 1.85 | 7.6 | 0.78 |
| AD-18327 | 11.6 | 2.64 | 9.6 | 1.67 |
| AD-18328 | 1.1 | 0.70 | 0.6 | 0.16 |
| AD-23005 | 0.8 | 0.31 | 0.6 | 0.21 |
| AD-23006 | 1.5 | 0.46 | 1.2 | 0.43 |
| AD-23007 | 2.4 | 0.91 | 1.9 | 0.46 |
| AD-23008 | 0.6 | 0.10 | 0.8 | 0.26 |
| AD-23009 | 1.0 | 0.13 | 0.9 | 0.22 |
| AD-23010 | 60.1 | 15.66 | 66.2 | 22.71 |
| AD-23011 | 56.5 | 16.99 | 53.6 | 4.70 |
| AD-23012 | 7.7 | 2.36 | 7.7 | 3.25 |
| AD-23013 | 7.0 | 0.64 | 8.0 | 1.06 |
| AD-23014 | 0.7 | 0.01 | 0.6 | 0.10 |
| AD-23015 | 15.4 | 0.25 | 16.5 | 7.07 |
| AD-23016 | 27.1 | 0.37 | 6.7 | 1.80 |
| AD-23017 | 4.5 | 1.26 | 1.4 | 0.40 |
| AD-23018 | 44.6 | 9.45 | 7.5 | 1.09 |
| AD-23019 | 2.2 | 0.68 | 0.8 | 0.10 |
| AD-23020 | 52.7 | 6.45 | 29.7 | 1.17 |
| AD-23021 | 95.4 | 16.16 | 45.0 | 3.00 |
| AD-23022 | 70.1 | 3.01 | 60.8 | 12.11 |
| AD-23023 | 2.7 | 1.12 | 1.8 | 0.07 |
| AD-23024 | 1.7 | 0.30 | 1.8 | 0.33 |
| AD-23025 | 64.2 | 13.21 | 10.5 | 1.34 |
| AD-23026 | 1.9 | 0.15 | 1.9 | 0.78 |
| AD-23027 | 2.5 | 0.21 | 1.6 | 0.49 |
| AD-23028 | 6.7 | 4.41 | 1.2 | 0.50 |
| AD-18330 | 6.0 | 0.56 | 5.7 | 1.15 |
| AD-23029 | 4.5 | 0.47 | 1.6 | 0.10 |
| AD-23030 | 3.9 | 0.25 | 3.3 | 0.84 |
| AD-23031 | 3.4 | 0.78 | 1.7 | 0.02 |

### Example 14. Evaluation of Infusion Duration on Efficacy of a Single Intravenous Administration of SNALP-18534 in Sprague-Dawley Rats

### Objectives

[0322] To determine the effect of infusion duration on efficacy of a single IV infusion of SNALP-18534 on liver TTR mRNA levels in Sprague-Dawley rats.

TABLE 15
Abbreviations and definitions used

| | |
|---|---|
| SNALP-18534 | Rodent transthyretin specific siRNA formulated |
| | in SNALP |
| SNALP-1955 | Non-mammalian luciferase specific siRNA formulated |
| | in SNALP |

[0323] The sequences of the sense and antisense strands of AD-18534 are reproduced below from the tables above:

| | | | | SEQ |
|---|---|---|---|---|
| | Oligo | Po- | Sequence | ID |
| Strand | # | sition | 5′ to 3′ | NO: |
| s | A-32755 | 532 | cAGuGuucuuGcucuAuAAdTdT | 1289 |
| as | A-32756 | 550 | UuAuAGAGcAAGAAcACUGdTdT | 1290 |

### Study Materials

### Test Article(s)

[0324] SNALP-18534 is comprised of an siRNA targeting rodent TTR mRNA (AD-18534), formulated in stable nucleic acid lipid particles (SNALP) for delivery to target tissues. The SNALP formulation (lipid particle) consists of a novel aminolipid (DLinDMA), a PEGylated lipid (mPEG2000-C-DMA), a neutral lipid (DPPC) and cholesterol. The ratio of lipid:nucleic acid in the SNALP formulation is approximately 5.8:1 (w:w). SNALP-1955 contains an siRNA targeting the non-mammalian luciferase mRNA, is formulated with the identical lipid particle as SNALP-18534, and serves as a non-pharmacologically active control. Dose levels are expressed as mg/kg based on the weight of siRNA content.

### Study Design & Procedures

### Animals and Test Article Administration:

[0325] The study was comprised of 9 groups of Sprague-Dawley rats (4 males/group). The animals were allowed to have at least a 2 day acclimation period before the study and all animals were 7 weeks old at the initiation of dosing. The dose administered was calculated based upon body weight data collected prior to dosing on Day 1. The test and control articles were administered as a single 15-minute, 1-hour, 2-hour, or 3-hour IV infusion via the tail vein using a 24G ¾″ cannula sealed with a Baxter Injection Site septum connected via 27G Terumo butterfly needle to a Baxter AS40A Syringe Pump. The dose volume was 3 ml/kg, the infusion rate was 12 ml/kg/hr, and animals were freely moving in the cages during dosing. Rats were divided into nine treatment groups and administered a single IV infusion of SNALP-18534, SNALP-1955, or PBS as shown in Table 16:

TABLE 16
Test Animal Dosage Groups

| Group | N | Test Article | Infusion Duration | | Dose |
|---|---|---|---|---|---|
| A | 4 | PBS | 15 | minute | — |
| B | 4 | PBS | 3 | hour | — |
| C | 4 | SNALP -1955 | 1 | hour | 1 mg/kg |
| D | 4 | SNALP -1955 | 2 | hour | 1 mg/kg |
| E | 4 | SNALP -1955 | 3 | hour | 1 mg/kg |
| F | 4 | SNALP-18534 | 15 | minute | 1 mg/kg |
| G | 4 | SNALP-18534 | 1 | hour | 1 mg/kg |
| H | 4 | SNALP-18534 | 2 | hour | 1 mg/kg |
| I | 4 | SNALP-18534 | 3 | hour | 1 mg/kg |

### Tissue Collection and RNA Isolation:

[0326] On Day 0, animals were anesthetized by isofluorane inhalation and pre-dosing blood samples were collected into serum separator tubes by retro-orbital bleed. The blood samples were allowed to clot at room temperature for approximately 30 minutes prior to centrifugation at 4° C. Serum samples were then stored at −80° C. until analysis was performed. On Day 3, animals in all nine treatment groups were given a lethal dose of ketamine/xylazine. Blood was collected via caudal vena cava into serum separation tubes, and then allowed to clot at room temperature for approximately 30 minutes prior to centrifugation at 4° C. Serum samples were stored at −80° C. until analysis was performed. Liver tissue was harvested and snap frozen on dry ice. Frozen liver tissue was ground and tissue lysates were prepared for liver mRNA quantitation.

TTR mRNA Quantitation:

[0327] TTR mRNA levels relative to those of GAPDH mRNA were determined in the lysates by using a branched DNA assay (QuantiGene Reagent System, Panomics, Fremont, CA). Briefly, the QuantiGene assay (Genospectra) was used to quantify mRNA levels in tissue sample lysates according to the manufacturer's instructions. The mean level of TTR mRNA was normalized to the mean level of GAPDH mRNA for each sample.

[0328] To obtain the relative level of TTR mRNA expression, group mean values for SNALP-1955 and SNALP-18534 treated groups with 15-minute, 1 hour and 2 hour infusion durations were then normalized to the mean value for the PBS treated group with 15-minute infusion whereas group mean values for SNALP-1955 and SNALP-18534 treated groups with 3 hour infusion duration were then normalized to the mean value for the PBS treated group with 3 hour infusion duration.

### Results

[0329] As shown in FIG. 16, a single IV infusion of 1 mg/kg SNALP-18534 with different infusion durations of 15 minutes to 3 hours results in comparable inhibition of liver TTR mRNA levels measured two days after dosing. A single IV infusion of 1 mg/kg SNALP-18534 also showed durable TTR downregulation over 29 days following a single 15 minute IV infusion, as compared to SNALP-1955 control (data not shown). Compared to the PBS-treated group, a single 15-minute, 1-hour, 2-hour, or 3-hour IV infusion of SNALP-18534 at 1 mg/kg significantly reduced relative TTR mRNA expression levels by 94% (p<0.001), 94% (p<0.001), 92% (p<0.001) and 93% (p<0.001), respectively. Specificity of SNALP-18534 activity is demonstrated by lack of significant target inhibition by SNALP-1955 administration via 1-hour, 2-hour, or 3-hour IV infusion at the same dose level.

### Conclusions

[0330] This study demonstrates that varying the infusion duration from 15 minutes to up to 3 hours does not affect the efficacy of a single IV administration of 1 mg/kg SNALP-18534 in rats, as assessed by reduction of TTR mRNA levels in the liver.

### Example 15. In Vivo Reduction of Wild-Type TTR mRNA in the Rat Liver by LNP07-18534 and LNP08-18534

[0331] To evaluate the efficacy of 2 novel lipid nanoparticle formulations, LNP07 and LNP08, for delivery of siRNA in the rat, the rodent-specific TTR siRNA, AD-18534, was formulated in LNP07 (LNP07-18534) or LNP08 (LNP08-18534), and administered by 15-minute IV infusion, and liver TTR mRNA was quantified. Sprague-Dawley rats (4 animals per group) were administered 15-minute IV infusions of LNP07-18534 (0.03, 0.1, 0.3 or 1 mg/kg), LNP08-18534 (0.01, 0.03 or 0.1 mg/kg), or LNP07-1955 (1 mg/kg) or LNP08-1955 (0.1 mg/kg) containing the negative control siRNA AD-1955 which targets the non-mammalian gene luciferase. Forty-eight hours later, animals were euthanized and liver tissue was collected, flash-frozen and stored at −80° C. until processing.

[0332] For TTR mRNA quantitation, frozen liver tissue was ground into powder, and lysates were prepared. TTR mRNA levels relative to those of GAPDH mRNA were determined in the lysates by using a branched DNA assay (QuantiGene Reagent System, Panomics, Fremont, CA). Briefly, the QuantiGene assay (Genospectra) was used to quantify mRNA levels in tissue sample lysates according to the manufacturer's instructions. The mean level of TTR mRNA was normalized to the mean level of GAPDH mRNA for each sample. Group means of the normalized values were then further normalized to the mean value for the PBS treated group, to obtain the relative level of TTR mRNA expression.

[0333] The results are shown in FIG. 17. LNP07-18534 reduced TTR mRNA levels in the liver in a dose-dependent manner, with 94% suppression of TTR mRNA at 1 mg/kg. The effect was specific, since the negative control LNP07-1955 at 1 mg/kg did not significantly affect TTR mRNA levels compared to the PBS control. The mRNA ED50 was determined to be ˜0.05 mg/kg LNP07-18534. LNP08-18534 reduced TTR mRNA levels in the liver in a dose-dependent manner, with 86% suppression of TTR mRNA at 0.1 mg/kg. The effect was specific, since the negative control LNP08-1955 at 0.1 mg/kg did not significantly affect TTR mRNA levels compared to the PBS control. The mRNA ED50 was determined to be ˜0.02 mg/kg LNP08-18534.

[0334] These results demonstrate that LNP07-18534 and LNP08-18534 are effective in suppressing wild-type TTR mRNA in the rat liver when administered by IV infusion, and that LNP07 and LNP08 are effective formulations for delivering siRNA to the liver.

### Example 16: Reduction of TTR Liver mRNA by a Single Intravenous Administration of LNP09-18534 or LNP11-18534 in Sprague-Dawley Rats

### Objective:

[0335] To evaluate the efficacy of two novel lipid nanoparticle (LNP) formulations for delivery of the rodent TTR-specific siRNA, AD-18534 in the Sprague-Dawley rat for reducing endogenous (wild type) liver TTR mRNA levels. Rats were intravenously dosed via a 15 minute infusion with either 0.01, 0.03, 0.1, or 0.3 mg/kg LNP09-18534, LNP11-18534, or phosphate buffered saline (PBS) and TTR liver mRNA levels were assayed at 48 hrs post-treatment.

### Material and Methods:

[0336] LNP09 formulation: (XTC/DSPC/Chol/PEG₂₀₀₀-C14)=50/10/38.5/1.5 mol %; Lipid: siRNA˜11:1. LNP11 formulation: (MC3/DSPC/Chol/PEG₂₀₀₀-C14)=50/10/38.5/1.5 mol %; Lipid: siRNA˜11.1

[0337] Tissue collection and RNA isolation: On Day 3, animals in all treatment groups were given a lethal dose of ketamine/xylazine. Blood was collected via caudal vena cava into serum separation tubes, and then allowed to clot at room temperature for approximately 30 minutes prior to centrifugation at 4° C. Serum samples were stored at −80° C. until for future analysis. Liver tissues were harvested and snap frozen on dry ice. Frozen liver tissue was ground and tissue lysates were prepared for liver mRNA quantitation.

[0338] TTR mRNA Quantitation: TTR mRNA levels relative to those of GAPDH mRNA were determined in the lysates by using a branched DNA assay (QuantiGene Reagent System, Panomics, Fremont, CA). Briefly, the QuantiGene assay (Genospectra) was used to quantify mRNA levels in tissue sample lysates according to the manufacturer's instructions. The mean level of TTR mRNA was normalized to the mean level of GAPDH mRNA for each sample. Group mean values were then normalized to the mean value for the PBS treated group, to obtain the relative level of TTR mRNA expression.

### Results:

[0339] As shown in FIG. 18, in contrast with PBS treated animals, LNP09-18534 and LNP11-18534 treated animals had a significant dose-dependent decrease in TTR mRNA levels in the liver, reaching maximum reduction of ˜90% mRNA reduction for both LNP09 and LNP11 formulated groups, relative to PBC control group at 0.3 mg/kg, and a dose achieving 50% reduction (ED₅₀) of <0.03 mg/kg for LNP11-18534 and <0.1 mg/kg for LNP09-18534.

### Conclusions

[0340] This study demonstrates that a single 15 minute IV infusion of LNP09-18534 or LNP11-18534 in Sprague-Dawley rats results in a dose-dependent reduction of liver TTR mRNA. These data demonstrate the efficacy of LNP09-18328 and LNP11-18328 in reducing endogenously expressed (wild type) TTR mRNA with ED50 levels of <0.03 and <0.1 mg/kg for LNP11-18534 and LNP09-18534, respectively.

### Example 17: Inhibition of TTR in Humans

[0341] A human subject is treated with a dsRNA targeted to a TTR gene to inhibit expression of the TTR gene to treat a condition.

[0342] A subject in need of treatment is selected or identified. The subject can have a liver disorder, transthyretin amyloidosis, and/or a transplanted liver.

[0343] The identification of the subject can occur in a clinical setting, or elsewhere, e.g., in the subject's home through the subject's own use of a self-testing kit.

[0344] At time zero, a suitable first dose of an anti-TTR siRNA is administered to the subject. The dsRNA is formulated as described herein. After a period of time following the first dose, e.g., 7 days, 14 days, and 21 days, the subject's condition is evaluated, e.g., by measuring liver function. This measurement can be accompanied by a measurement of TTR expression in said subject, and/or the products of the successful siRNA-targeting of TTR mRNA. Other relevant criteria can also be measured. The number and strength of doses are adjusted according to the subject's needs.

[0345] After treatment, the subject's tumor growth rate is lowered relative to the rate existing prior to the treatment, or relative to the rate measured in a similarly afflicted but untreated subject.

1. A salt of a double-stranded ribonucleic acid (dsRNA) for inhibiting expression of transthyretin (TTR), wherein the dsRNA comprises a sense strand and an antisense strand forming a double stranded region, wherein the antisense strand comprising a region complementary to a part of a mRNA encoding transthyretin (TTR), wherein the region of complementarity is less than 30 nucleotides in length and the antisense strand comprises 15 or more contiguous nucleotides of the nucleotide sequence 5′-AUGGAAUACUCUUGGUUAC-3′ of SEQ ID NO: 170.

2. The salt of claim 1, wherein the sense strand comprises 15 or more contiguous nucleotides of the nucleotide sequence 5′-AUGGAAUACUCUUGGUUAC-3′ of SEQ ID NO: 169.

3. The salt of claim 1, wherein the sense strand consists of the nucleotide sequence 5′-GUAACCAAGAGUAUUCCAUNN-3′ of SEQ ID NO:449 and the antisense strand consists of the nucleotide sequence 5′-AUGGAAUACUCUUGGUUACNN-3′ of SEQ ID NO:450.

4. The salt of claim 1, wherein the sense strand consists of the nucleotide sequence 5′-GUAACCAAGAGUAUUCCAUdTdT-3′ of SEQ ID NO:729 and the antisense strand consists of the nucleotide sequence 5′-AUGGAAUACUCUUGGUUACdTdT-3′ of SEQ ID NO:730.

5. The salt of claim 1, wherein the sense strand consists of the nucleotide sequence 5′-GuAAccAAGAGuAuuccAudTdT-3′ of SEQ ID NO: 1009 and the antisense strand consists of the nucleotide sequence 5′-AUGGAAuACUCUUGGUuACdTdT-3′ of SEQ ID NO:1010.

6-13. (canceled)

14. The salt of claim 1, wherein the dsRNA comprises at least one modified nucleotide.

15. The salt of claim 14, wherein at least one of the modified nucleotides is selected from the group of a 2′-O-methyl modified nucleotide, a nucleotide comprising a 5′-phosphorothioate group, a 2′-deoxy-2′-fluoro modified nucleotide, a 2′-deoxy-modified nucleotide, a locked nucleotide, an abasic nucleotide, 2′-amino-modified nucleotide, 2′-alkyl-modified nucleotide, morpholino nucleotide, a phosphoramidate, a non-natural base comprising nucleotide and a terminal nucleotide linked to a cholesteryl derivative or dodecanoic acid bisdecylamide group.

16-18. (canceled)

19. The salt of claim 1, wherein the salt of the dsRNA is formulated in a lipid formulation.

20. The salt of claim 19, wherein the lipid formulation comprises a cationic lipid, a non-cationic lipid, and a lipid that prevents aggregation of particles.

21-44. (canceled)

45. A pharmaceutical composition for inhibiting expression of a TTR gene comprising the salt of the dsRNA of claim 1 and a pharmaceutically acceptable carrier.

46. (canceled)

47. A method of inhibiting TTR expression in a cell, the method comprising:
(a) contacting the cell with the salt of the dsRNA of claim 1; and
(b) maintaining the cell produced in step (a) for a time sufficient to obtain degradation of the mRNA transcript of a TTR gene, thereby inhibiting the expression of the TTR gene in the cell.

48. A method of treating a disorder mediated by TTR expression comprising administering to a human in need of such treatment a therapeutically effective amount of the salt of the dsRNA of claim 1.

49. (canceled)

50. (canceled)

51. The method of claim 48, wherein the human has transthyretin amyloidosis.

52. The method of claim 48, wherein the human has a liver disorder.

53. (canceled)

54. The method of claim 48, wherein administration of the salt of the dsRNA reduces TTR mRNA by about 80% in human liver.

55-71. (canceled)

72. The salt of claim 20, wherein the cationic lipid is (6Z,9Z,28Z,31Z)-heptatriaconta-6,9,28,31-tetraen-19-yl 4-(dimethylamino) butanoate.

73. The salt of claim 20, wherein the non-cationic lipid is distearoylphosphatidylcholine (DSPC).

74. The salt of claim 20, wherein the lipid that prevents aggregation of particles is a polyethyleneglycol (PEG)-lipid.

75. The salt of claim 19, wherein the lipid formulation further comprises cholesterol.

76. The method of claim 48, wherein the disorder is selected from the group consisting of familial amyloidotic polyneuropathy (FAP), familial amyloidotic cardiomyopathy (FAC), leptomeningeal/CNS amyloidosis, senile systemic amyloidosis (SSA) and senile cardiac amyloidosis (SCA).

The application's sequence listing, which the Patent Office published only in electronic form, follows.

SEQUENCE LISTING (1410 sequences)

SEQ ID NO: 1 - RNA, 19 nt, Homo sapiens
  source 1..19: mol_type = unassigned RNA
ccggtgaatccaagtgtcc

SEQ ID NO: 2 - RNA, 19 nt, Homo sapiens
  source 1..19: mol_type = unassigned RNA
ggacacttggattcaccgg

SEQ ID NO: 3 - RNA, 19 nt, Homo sapiens
  source 1..19: mol_type = unassigned RNA
actcattcttggcaggatg

SEQ ID NO: 4 - RNA, 19 nt, Homo sapiens
  source 1..19: mol_type = unassigned RNA
catcctgccaagaatgagt

SEQ ID NO: 5 - RNA, 19 nt, Homo sapiens
  source 1..19: mol_type = unassigned RNA
aagtgtcctctgatggtca

SEQ ID NO: 6 - RNA, 19 nt, Homo sapiens
  source 1..19: mol_type = unassigned RNA
tgaccatcagaggacactt

SEQ ID NO: 7 - RNA, 19 nt, Homo sapiens
  source 1..19: mol_type = unassigned RNA
tcattcttggcaggatggc

SEQ ID NO: 8 - RNA, 19 nt, Homo sapiens
  source 1..19: mol_type = unassigned RNA
gccatcctgccaagaatga

SEQ ID NO: 9 - RNA, 19 nt, Homo sapiens
  source 1..19: mol_type = unassigned RNA
aagttctagatgctgtccg

SEQ ID NO: 10 - RNA, 19 nt, Homo sapiens
  source 1..19: mol_type = unassigned RNA
cggacagcatctagaactt

SEQ ID NO: 11 - RNA, 19 nt, Homo sapiens
  source 1..19: mol_type = unassigned RNA
gttctagatgctgtccgag

SEQ ID NO: 12 - RNA, 19 nt, Homo sapiens
  source 1..19: mol_type = unassigned RNA
ctcggacagcatctagaac

SEQ ID NO: 13 - RNA, 19 nt, Homo sapiens
  source 1..19: mol_type = unassigned RNA
ctagatgctgtccgaggca

SEQ ID NO: 14 - RNA, 19 nt, Homo sapiens
  source 1..19: mol_type = unassigned RNA
tgcctcggacagcatctag

SEQ ID NO: 15 - RNA, 19 nt, Homo sapiens
  source 1..19: mol_type = unassigned RNA
gatgctgtccgaggcagtc

SEQ ID NO: 16 - RNA, 19 nt, Homo sapiens
  source 1..19: mol_type = unassigned RNA
gactgcctcggacagcatc

SEQ ID NO: 17 - RNA, 19 nt, Homo sapiens
  source 1..19: mol_type = unassigned RNA
cattcttggcaggatggct

SEQ ID NO: 18 - RNA, 19 nt, Homo sapiens
  source 1..19: mol_type = unassigned RNA
agccatcctgccaagaatg

SEQ ID NO: 19 - RNA, 19 nt, Homo sapiens
  source 1..19: mol_type = unassigned RNA
tgctgtccgaggcagtcct

SEQ ID NO: 20 - RNA, 19 nt, Homo sapiens
  source 1..19: mol_type = unassigned RNA
aggactgcctcggacagca

SEQ ID NO: 21 - RNA, 19 nt, Homo sapiens
  source 1..19: mol_type = unassigned RNA
ccgaggcagtcctgccatc

SEQ ID NO: 22 - RNA, 19 nt, Homo sapiens
  source 1..19: mol_type = unassigned RNA
gatggcaggactgcctcgg

SEQ ID NO: 23 - RNA, 19 nt, Homo sapiens
  source 1..19: mol_type = unassigned RNA
cagtcctgccatcaatgtg

SEQ ID NO: 24 - RNA, 19 nt, Homo sapiens
  source 1..19: mol_type = unassigned RNA
cacattgatggcaggactg

SEQ ID NO: 25 - RNA, 19 nt, Homo sapiens
  source 1..19: mol_type = unassigned RNA
caatgtggccgtgcatgtg

SEQ ID NO: 26 - RNA, 19 nt, Homo sapiens
  source 1..19: mol_type = unassigned RNA
cacatgcacggccacattg

SEQ ID NO: 27 - RNA, 19 nt, Homo sapiens
  source 1..19: mol_type = unassigned RNA
atgtgttcagaaaggctgc

SEQ ID NO: 28 - RNA, 19 nt, Homo sapiens
  source 1..19: mol_type = unassigned RNA
gcagcctttctgaacacat

SEQ ID NO: 29 - RNA, 19 nt, Homo sapiens
  source 1..19: mol_type = unassigned RNA
cagaagtccactcattctt

SEQ ID NO: 30 - RNA, 19 nt, Homo sapiens
  source 1..19: mol_type = unassigned RNA
aagaatgagtggacttctg

SEQ ID NO: 31 - RNA, 19 nt, Homo sapiens
  source 1..19: mol_type = unassigned RNA
ggcaggatggcttctcatc

SEQ ID NO: 32 - RNA, 19 nt, Homo sapiens
  source 1..19: mol_type = unassigned RNA
gatgagaagccatcctgcc

SEQ ID NO: 33 - RNA, 19 nt, Homo sapiens
  source 1..19: mol_type = unassigned RNA
gagccatttgcctctggga

SEQ ID NO: 34 - RNA, 19 nt, Homo sapiens
  source 1..19: mol_type = unassigned RNA
tcccagaggcaaatggctc

SEQ ID NO: 35 - RNA, 19 nt, Homo sapiens
  source 1..19: mol_type = unassigned RNA
caggatggcttctcatcgt

SEQ ID NO: 36 - RNA, 19 nt, Homo sapiens
  source 1..19: mol_type = unassigned RNA
acgatgagaagccatcctg

SEQ ID NO: 37 - RNA, 19 nt, Homo sapiens
  source 1..19: mol_type = unassigned RNA
aggatggcttctcatcgtc

SEQ ID NO: 38 - RNA, 19 nt, Homo sapiens
  source 1..19: mol_type = unassigned RNA
gacgatgagaagccatcct

SEQ ID NO: 39 - RNA, 19 nt, Homo sapiens
  source 1..19: mol_type = unassigned RNA
agagctgcatgggctcaca

SEQ ID NO: 40 - RNA, 19 nt, Homo sapiens
  source 1..19: mol_type = unassigned RNA
tgtgagcccatgcagctct

SEQ ID NO: 41 - RNA, 19 nt, Homo sapiens
  source 1..19: mol_type = unassigned RNA
gctgcatgggctcacaact

SEQ ID NO: 42 - RNA, 19 nt, Homo sapiens
  source 1..19: mol_type = unassigned RNA
agttgtgagcccatgcagc

SEQ ID NO: 43 - RNA, 19 nt, Homo sapiens
  source 1..19: mol_type = unassigned RNA
ggatggcttctcatcgtct

SEQ ID NO: 44 - RNA, 19 nt, Homo sapiens
  source 1..19: mol_type = unassigned RNA
agacgatgagaagccatcc

SEQ ID NO: 45 - RNA, 19 nt, Homo sapiens
  source 1..19: mol_type = unassigned RNA
gcatgggctcacaactgag

SEQ ID NO: 46 - RNA, 19 nt, Homo sapiens
  source 1..19: mol_type = unassigned RNA
ctcagttgtgagcccatgc

SEQ ID NO: 47 - RNA, 19 nt, Homo sapiens
  source 1..19: mol_type = unassigned RNA
atgggctcacaactgagga

SEQ ID NO: 48 - RNA, 19 nt, Homo sapiens
  source 1..19: mol_type = unassigned RNA
tcctcagttgtgagcccat

SEQ ID NO: 49 - RNA, 19 nt, Homo sapiens
  source 1..19: mol_type = unassigned RNA
tgggctcacaactgaggag

SEQ ID NO: 50 - RNA, 19 nt, Homo sapiens
  source 1..19: mol_type = unassigned RNA
ctcctcagttgtgagccca

SEQ ID NO: 51 - RNA, 19 nt, Homo sapiens
  source 1..19: mol_type = unassigned RNA
gaggaatttgtagaaggga

SEQ ID NO: 52 - RNA, 19 nt, Homo sapiens
  source 1..19: mol_type = unassigned RNA
tcccttctacaaattcctc

SEQ ID NO: 53 - RNA, 19 nt, Homo sapiens
  source 1..19: mol_type = unassigned RNA
tttgtagaagggatataca

SEQ ID NO: 54 - RNA, 19 nt, Homo sapiens
  source 1..19: mol_type = unassigned RNA
tgtatatcccttctacaaa

SEQ ID NO: 55 - RNA, 19 nt, Homo sapiens
  source 1..19: mol_type = unassigned RNA
ttgtagaagggatatacaa

SEQ ID NO: 56 - RNA, 19 nt, Homo sapiens
  source 1..19: mol_type = unassigned RNA
ttgtatatcccttctacaa

SEQ ID NO: 57 - RNA, 19 nt, Homo sapiens
  source 1..19: mol_type = unassigned RNA
tgtagaagggatatacaaa

SEQ ID NO: 58 - RNA, 19 nt, Homo sapiens
  source 1..19: mol_type = unassigned RNA
tttgtatatcccttctaca

SEQ ID NO: 59 - RNA, 19 nt, Homo sapiens
  source 1..19: mol_type = unassigned RNA
agaagggatatacaaagtg

SEQ ID NO: 60 - RNA, 19 nt, Homo sapiens
  source 1..19: mol_type = unassigned RNA
cactttgtatatcccttct

SEQ ID NO: 61 - RNA, 19 nt, Homo sapiens
  source 1..19: mol_type = unassigned RNA
aagtggaaatagacaccaa

SEQ ID NO: 62 - RNA, 19 nt, Homo sapiens
  source 1..19: mol_type = unassigned RNA
ttggtgtctatttccactt

SEQ ID NO: 63 - RNA, 19 nt, Homo sapiens
  source 1..19: mol_type = unassigned RNA
ggaaatagacaccaaatct

SEQ ID NO: 64 - RNA, 19 nt, Homo sapiens
  source 1..19: mol_type = unassigned RNA
agatttggtgtctatttcc

SEQ ID NO: 65 - RNA, 19 nt, Homo sapiens
  source 1..19: mol_type = unassigned RNA
gaaatagacaccaaatctt

SEQ ID NO: 66 - RNA, 19 nt, Homo sapiens
  source 1..19: mol_type = unassigned RNA
aagatttggtgtctatttc

SEQ ID NO: 67 - RNA, 19 nt, Homo sapiens
  source 1..19: mol_type = unassigned RNA
atagacaccaaatcttact

SEQ ID NO: 68 - RNA, 19 nt, Homo sapiens
  source 1..19: mol_type = unassigned RNA
agtaagatttggtgtctat

SEQ ID NO: 69 - RNA, 19 nt, Homo sapiens
  source 1..19: mol_type = unassigned RNA
tagacaccaaatcttactg

SEQ ID NO: 70 - RNA, 19 nt, Homo sapiens
  source 1..19: mol_type = unassigned RNA
cagtaagatttggtgtcta

SEQ ID NO: 71 - RNA, 19 nt, Homo sapiens
  source 1..19: mol_type = unassigned RNA
agacaccaaatcttactgg

SEQ ID NO: 72 - RNA, 19 nt, Homo sapiens
  source 1..19: mol_type = unassigned RNA
ccagtaagatttggtgtct

SEQ ID NO: 73 - RNA, 19 nt, Homo sapiens
  source 1..19: mol_type = unassigned RNA
ttactggaaggcacttggc

SEQ ID NO: 74 - RNA, 19 nt, Homo sapiens
  source 1..19: mol_type = unassigned RNA
gccaagtgccttccagtaa

SEQ ID NO: 75 - RNA, 19 nt, Homo sapiens
  source 1..19: mol_type = unassigned RNA
ttctcatcgtctgctcctc

SEQ ID NO: 76 - RNA, 19 nt, Homo sapiens
  source 1..19: mol_type = unassigned RNA
gaggagcagacgatgagaa

SEQ ID NO: 77 - RNA, 19 nt, Homo sapiens
  source 1..19: mol_type = unassigned RNA
ggaaggcacttggcatctc

SEQ ID NO: 78 - RNA, 19 nt, Homo sapiens
  source 1..19: mol_type = unassigned RNA
gagatgccaagtgccttcc

SEQ ID NO: 79 - RNA, 19 nt, Homo sapiens
  source 1..19: mol_type = unassigned RNA
ggcacttggcatctcccca

SEQ ID NO: 80 - RNA, 19 nt, Homo sapiens
  source 1..19: mol_type = unassigned RNA
tggggagatgccaagtgcc

SEQ ID NO: 81 - RNA, 19 nt, Homo sapiens
  source 1..19: mol_type = unassigned RNA
ggcatctccccattccatg

SEQ ID NO: 82 - RNA, 20 nt, Homo sapiens
  source 1..20: mol_type = unassigned RNA
  modified_base 19: mod_base = OTHER; note = Thymine
  modified_base 20: mod_base = OTHER; note = Thymine
atggaatggggagatgcctt

SEQ ID NO: 83 - RNA, 19 nt, Homo sapiens
  source 1..19: mol_type = unassigned RNA
gcatctccccattccatga

SEQ ID NO: 84 - RNA, 19 nt, Homo sapiens
  source 1..19: mol_type = unassigned RNA
tcatggaatggggagatgc

SEQ ID NO: 85 - RNA, 19 nt, Homo sapiens
  source 1..19: mol_type = unassigned RNA
catctccccattccatgag

SEQ ID NO: 86 - RNA, 19 nt, Homo sapiens
  source 1..19: mol_type = unassigned RNA
ctcatggaatggggagatg

SEQ ID NO: 87 - RNA, 19 nt, Homo sapiens
  source 1..19: mol_type = unassigned RNA
atctccccattccatgagc

SEQ ID NO: 88 - RNA, 19 nt, Homo sapiens
  source 1..19: mol_type = unassigned RNA
gctcatggaatggggagat

SEQ ID NO: 89 - RNA, 19 nt, Homo sapiens
  source 1..19: mol_type = unassigned RNA
ctccccattccatgagcat

SEQ ID NO: 90 - RNA, 19 nt, Homo sapiens
  source 1..19: mol_type = unassigned RNA
atgctcatggaatggggag

SEQ ID NO: 91 - RNA, 19 nt, Homo sapiens
  source 1..19: mol_type = unassigned RNA
cccattccatgagcatgca

SEQ ID NO: 92 - RNA, 19 nt, Homo sapiens
  source 1..19: mol_type = unassigned RNA
tgcatgctcatggaatggg

SEQ ID NO: 93 - RNA, 19 nt, Homo sapiens
  source 1..19: mol_type = unassigned RNA
ccatgagcatgcagaggtg

SEQ ID NO: 94 - RNA, 19 nt, Homo sapiens
  source 1..19: mol_type = unassigned RNA
cacctctgcatgctcatgg

SEQ ID NO: 95 - RNA, 19 nt, Homo sapiens
  source 1..19: mol_type = unassigned RNA
agcatgcagaggtggtatt

SEQ ID NO: 96 - RNA, 19 nt, Homo sapiens
  source 1..19: mol_type = unassigned RNA
aataccacctctgcatgct

SEQ ID NO: 97 - RNA, 19 nt, Homo sapiens
  source 1..19: mol_type = unassigned RNA
catgcagaggtggtattca

SEQ ID NO: 98 - RNA, 19 nt, Homo sapiens
  source 1..19: mol_type = unassigned RNA
tgaataccacctctgcatg

SEQ ID NO: 99 - RNA, 19 nt, Homo sapiens
  source 1..19: mol_type = unassigned RNA
atgcagaggtggtattcac

SEQ ID NO: 100 - RNA, 19 nt, Homo sapiens
  source 1..19: mol_type = unassigned RNA
gtgaataccacctctgcat

SEQ ID NO: 101 - RNA, 19 nt, Homo sapiens
  source 1..19: mol_type = unassigned RNA
ggtggtattcacagccaac

SEQ ID NO: 102 - RNA, 19 nt, Homo sapiens
  source 1..19: mol_type = unassigned RNA
gttggctgtgaataccacc

SEQ ID NO: 103 - RNA, 19 nt, Homo sapiens
  source 1..19: mol_type = unassigned RNA
gtggtattcacagccaacg

SEQ ID NO: 104 - RNA, 19 nt, Homo sapiens
  source 1..19: mol_type = unassigned RNA
cgttggctgtgaataccac

SEQ ID NO: 105 - RNA, 19 nt, Homo sapiens
  source 1..19: mol_type = unassigned RNA
tggtattcacagccaacga

SEQ ID NO: 106 - RNA, 19 nt, Homo sapiens
  source 1..19: mol_type = unassigned RNA
tcgttggctgtgaatacca

SEQ ID NO: 107 - RNA, 19 nt, Homo sapiens
  source 1..19: mol_type = unassigned RNA
ggtattcacagccaacgac

SEQ ID NO: 108 - RNA, 19 nt, Homo sapiens
  source 1..19: mol_type = unassigned RNA
gtcgttggctgtgaatacc

SEQ ID NO: 109 - RNA, 19 nt, Homo sapiens
  source 1..19: mol_type = unassigned RNA
gtattcacagccaacgact

SEQ ID NO: 110 - RNA, 19 nt, Homo sapiens
  source 1..19: mol_type = unassigned RNA
agtcgttggctgtgaatac

SEQ ID NO: 111 - RNA, 19 nt, Homo sapiens
  source 1..19: mol_type = unassigned RNA
tattcacagccaacgactc

SEQ ID NO: 112 - RNA, 19 nt, Homo sapiens
  source 1..19: mol_type = unassigned RNA
gagtcgttggctgtgaata

SEQ ID NO: 113 - RNA, 19 nt, Homo sapiens
  source 1..19: mol_type = unassigned RNA
tcacagccaacgactccgg

SEQ ID NO: 114 - RNA, 19 nt, Homo sapiens
  source 1..19: mol_type = unassigned RNA
ccggagtcgttggctgtga

SEQ ID NO: 115 - RNA, 19 nt, Homo sapiens
  source 1..19: mol_type = unassigned RNA
ccccgccgctacaccattg

SEQ ID NO: 116 - RNA, 19 nt, Homo sapiens
  source 1..19: mol_type = unassigned RNA
caatggtgtagcggcgggg

SEQ ID NO: 117 - RNA, 19 nt, Homo sapiens
  source 1..19: mol_type = unassigned RNA
gaagtccactcattcttgg

SEQ ID NO: 118 - RNA, 19 nt, Homo sapiens
  source 1..19: mol_type = unassigned RNA
ccaagaatgagtggacttc

SEQ ID NO: 119 - RNA, 19 nt, Homo sapiens
  source 1..19: mol_type = unassigned RNA
ccctgctgagcccctactc

SEQ ID NO: 120 - RNA, 19 nt, Homo sapiens
  source 1..19: mol_type = unassigned RNA
gagtaggggctcagcaggg

SEQ ID NO: 121 - RNA, 19 nt, Homo sapiens
  source 1..19: mol_type = unassigned RNA
ctgagcccctactcctatt

SEQ ID NO: 122 - RNA, 19 nt, Homo sapiens
  source 1..19: mol_type = unassigned RNA
aataggagtaggggctcag

SEQ ID NO: 123 - RNA, 19 nt, Homo sapiens
  source 1..19: mol_type = unassigned RNA
tgagcccctactcctattc

SEQ ID NO: 124 - RNA, 19 nt, Homo sapiens
  source 1..19: mol_type = unassigned RNA
gaataggagtaggggctca

SEQ ID NO: 125 - RNA, 19 nt, Homo sapiens
  source 1..19: mol_type = unassigned RNA
cccctactcctattccacc

SEQ ID NO: 126 - RNA, 19 nt, Homo sapiens
  source 1..19: mol_type = unassigned RNA
ggtggaataggagtagggg

SEQ ID NO: 127 - RNA, 19 nt, Homo sapiens
  source 1..19: mol_type = unassigned RNA
ctactcctattccaccacg

SEQ ID NO: 128 - RNA, 19 nt, Homo sapiens
  source 1..19: mol_type = unassigned RNA
cgtggtggaataggagtag

SEQ ID NO: 129 - RNA, 19 nt, Homo sapiens
  source 1..19: mol_type = unassigned RNA
tactcctattccaccacgg

SEQ ID NO: 130 - RNA, 19 nt, Homo sapiens
  source 1..19: mol_type = unassigned RNA
ccgtggtggaataggagta

SEQ ID NO: 131 - RNA, 19 nt, Homo sapiens
  source 1..19: mol_type = unassigned RNA
actcctattccaccacggc

SEQ ID NO: 132 - RNA, 19 nt, Homo sapiens
  source 1..19: mol_type = unassigned RNA
gccgtggtggaataggagt

SEQ ID NO: 133 - RNA, 19 nt, Homo sapiens
  source 1..19: mol_type = unassigned RNA
tcctattccaccacggctg

SEQ ID NO: 134 - RNA, 19 nt, Homo sapiens
  source 1..19: mol_type = unassigned RNA
cagccgtggtggaatagga

SEQ ID NO: 135 - RNA, 19 nt, Homo sapiens
  source 1..19: mol_type = unassigned RNA
tattccaccacggctgtcg

SEQ ID NO: 136 - RNA, 19 nt, Homo sapiens
  source 1..19: mol_type = unassigned RNA
cgacagccgtggtggaata

SEQ ID NO: 137 - RNA, 19 nt, Homo sapiens
  source 1..19: mol_type = unassigned RNA
attccaccacggctgtcgt

SEQ ID NO: 138 - RNA, 19 nt, Homo sapiens
  source 1..19: mol_type = unassigned RNA
acgacagccgtggtggaat

SEQ ID NO: 139 - RNA, 19 nt, Homo sapiens
  source 1..19: mol_type = unassigned RNA
caccacggctgtcgtcacc

SEQ ID NO: 140 - RNA, 19 nt, Homo sapiens
  source 1..19: mol_type = unassigned RNA
ggtgacgacagccgtggtg

SEQ ID NO: 141 - RNA, 19 nt, Homo sapiens
  source 1..19: mol_type = unassigned RNA
accacggctgtcgtcacca

SEQ ID NO: 142 - RNA, 19 nt, Homo sapiens
  source 1..19: mol_type = unassigned RNA
tggtgacgacagccgtggt

SEQ ID NO: 143 - RNA, 19 nt, Homo sapiens
  source 1..19: mol_type = unassigned RNA
ccacggctgtcgtcaccaa

SEQ ID NO: 144 - RNA, 19 nt, Homo sapiens
  source 1..19: mol_type = unassigned RNA
ttggtgacgacagccgtgg

SEQ ID NO: 145 - RNA, 19 nt, Homo sapiens
  source 1..19: mol_type = unassigned RNA
acggctgtcgtcaccaatc

SEQ ID NO: 146 - RNA, 19 nt, Homo sapiens
  source 1..19: mol_type = unassigned RNA
gattggtgacgacagccgt

SEQ ID NO: 147 - RNA, 19 nt, Homo sapiens
  source 1..19: mol_type = unassigned RNA
cggctgtcgtcaccaatcc

SEQ ID NO: 148 - RNA, 19 nt, Homo sapiens
  source 1..19: mol_type = unassigned RNA
ggattggtgacgacagccg

SEQ ID NO: 149 - RNA, 19 nt, Homo sapiens
  source 1..19: mol_type = unassigned RNA
cgtcaccaatcccaaggaa

SEQ ID NO: 150 - RNA, 19 nt, Homo sapiens
  source 1..19: mol_type = unassigned RNA
ttccttgggattggtgacg

SEQ ID NO: 151 - RNA, 19 nt, Homo sapiens
  source 1..19: mol_type = unassigned RNA
caatcccaaggaatgaggg

SEQ ID NO: 152 - RNA, 19 nt, Homo sapiens
  source 1..19: mol_type = unassigned RNA
ccctcattccttgggattg

SEQ ID NO: 153 - RNA, 19 nt, Homo sapiens
  source 1..19: mol_type = unassigned RNA
cctgaaggacgagggatgg

SEQ ID NO: 154 - RNA, 19 nt, Homo sapiens
  source 1..19: mol_type = unassigned RNA
ccatccctcgtccttcagg

SEQ ID NO: 155 - RNA, 19 nt, Homo sapiens
  source 1..19: mol_type = unassigned RNA
ggacgagggatgggatttc

SEQ ID NO: 156 - RNA, 19 nt, Homo sapiens
  source 1..19: mol_type = unassigned RNA
gaaatcccatccctcgtcc

SEQ ID NO: 157 - RNA, 19 nt, Homo sapiens
  source 1..19: mol_type = unassigned RNA
aagtccactcattcttggc

SEQ ID NO: 158 - RNA, 19 nt, Homo sapiens
  source 1..19: mol_type = unassigned RNA
gccaagaatgagtggactt

SEQ ID NO: 159 - RNA, 19 nt, Homo sapiens
  source 1..19: mol_type = unassigned RNA
gggatttcatgtaaccaag

SEQ ID NO: 160 - RNA, 19 nt, Homo sapiens
  source 1..19: mol_type = unassigned RNA
cttggttacatgaaatccc

SEQ ID NO: 161 - RNA, 19 nt, Homo sapiens
  source 1..19: mol_type = unassigned RNA
ggatttcatgtaaccaaga

SEQ ID NO: 162 - RNA, 19 nt, Homo sapiens
  source 1..19: mol_type = unassigned RNA
tcttggttacatgaaatcc

SEQ ID NO: 163 - RNA, 19 nt, Homo sapiens
  source 1..19: mol_type = unassigned RNA
tcatgtaaccaagagtatt

SEQ ID NO: 164 - RNA, 19 nt, Homo sapiens
  source 1..19: mol_type = unassigned RNA
aatactcttggttacatga

SEQ ID NO: 165 - RNA, 19 nt, Homo sapiens
  source 1..19: mol_type = unassigned RNA
atgtaaccaagagtattcc

SEQ ID NO: 166 - RNA, 19 nt, Homo sapiens
  source 1..19: mol_type = unassigned RNA
ggaatactcttggttacat

SEQ ID NO: 167 - RNA, 19 nt, Homo sapiens
  source 1..19: mol_type = unassigned RNA
tgtaaccaagagtattcca

SEQ ID NO: 168 - RNA, 19 nt, Homo sapiens
  source 1..19: mol_type = unassigned RNA
tggaatactcttggttaca

SEQ ID NO: 169 - RNA, 19 nt, Homo sapiens
  source 1..19: mol_type = unassigned RNA
gtaaccaagagtattccat

SEQ ID NO: 170 - RNA, 19 nt, Homo sapiens
  source 1..19: mol_type = unassigned RNA
atggaatactcttggttac

SEQ ID NO: 171 - RNA, 19 nt, Homo sapiens
  source 1..19: mol_type = unassigned RNA
tgccttgctggactggtat

SEQ ID NO: 172 - RNA, 19 nt, Homo sapiens
  source 1..19: mol_type = unassigned RNA
ataccagtccagcaaggca

SEQ ID NO: 173 - RNA, 19 nt, Homo sapiens
  source 1..19: mol_type = unassigned RNA
taaagcagtgttttcacct

SEQ ID NO: 174 - RNA, 19 nt, Homo sapiens
  source 1..19: mol_type = unassigned RNA
aggtgaaaacactgcttta

SEQ ID NO: 175 - RNA, 19 nt, Homo sapiens
  source 1..19: mol_type = unassigned RNA
gccttgctggactggtatt

SEQ ID NO: 176 - RNA, 19 nt, Homo sapiens
  source 1..19: mol_type = unassigned RNA
aataccagtccagcaaggc

SEQ ID NO: 177 - RNA, 19 nt, Homo sapiens
  source 1..19: mol_type = unassigned RNA
tgttttcacctcatatgct

SEQ ID NO: 178 - RNA, 19 nt, Homo sapiens
  source 1..19: mol_type = unassigned RNA
agcatatgaggtgaaaaca

SEQ ID NO: 179 - RNA, 19 nt, Homo sapiens
  source 1..19: mol_type = unassigned RNA
gttttcacctcatatgcta

SEQ ID NO: 180 - RNA, 19 nt, Homo sapiens
  source 1..19: mol_type = unassigned RNA
tagcatatgaggtgaaaac

SEQ ID NO: 181 - RNA, 19 nt, Homo sapiens
  source 1..19: mol_type = unassigned RNA
ttttcacctcatatgctat

SEQ ID NO: 182 - RNA, 19 nt, Homo sapiens
  source 1..19: mol_type = unassigned RNA
atagcatatgaggtgaaaa

SEQ ID NO: 183 - RNA, 19 nt, Homo sapiens
  source 1..19: mol_type = unassigned RNA
ttcacctcatatgctatgt

SEQ ID NO: 184 - RNA, 19 nt, Homo sapiens
  source 1..19: mol_type = unassigned RNA
acatagcatatgaggtgaa

SEQ ID NO: 185 - RNA, 19 nt, Homo sapiens
  source 1..19: mol_type = unassigned RNA
cacctcatatgctatgtta

SEQ ID NO: 186 - RNA, 19 nt, Homo sapiens
  source 1..19: mol_type = unassigned RNA
taacatagcatatgaggtg

SEQ ID NO: 187 - RNA, 19 nt, Homo sapiens
  source 1..19: mol_type = unassigned RNA
ccttgctggactggtattt

SEQ ID NO: 188 - RNA, 19 nt, Homo sapiens
  source 1..19: mol_type = unassigned RNA
aaataccagtccagcaagg

SEQ ID NO: 189 - RNA, 19 nt, Homo sapiens
  source 1..19: mol_type = unassigned RNA
atatgctatgttagaagtc

SEQ ID NO: 190 - RNA, 19 nt, Homo sapiens
  source 1..19: mol_type = unassigned RNA
gacttctaacatagcatat

SEQ ID NO: 191 - RNA, 19 nt, Homo sapiens
  source 1..19: mol_type = unassigned RNA
tatgctatgttagaagtcc

SEQ ID NO: 192 - RNA, 19 nt, Homo sapiens
  source 1..19: mol_type = unassigned RNA
ggacttctaacatagcata

SEQ ID NO: 193 - RNA, 19 nt, Homo sapiens
  source 1..19: mol_type = unassigned RNA
tgctatgttagaagtccag

SEQ ID NO: 194 - RNA, 19 nt, Homo sapiens
  source 1..19: mol_type = unassigned RNA
ctggacttctaacatagca

SEQ ID NO: 195 - RNA, 19 nt, Homo sapiens
  source 1..19: mol_type = unassigned RNA
cttgctggactggtatttg

SEQ ID NO: 196 - RNA, 19 nt, Homo sapiens
  source 1..19: mol_type = unassigned RNA
caaataccagtccagcaag

SEQ ID NO: 197 - RNA, 19 nt, Homo sapiens
  source 1..19: mol_type = unassigned RNA
agtccaggcagagacaata

SEQ ID NO: 198 - RNA, 20 nt, Homo sapiens
  source 1..20: mol_type = unassigned RNA
  modified_base 19: mod_base = OTHER; note = Thymine
  modified_base 20: mod_base = OTHER; note = Thymine
attgtctctgcctggacttt

SEQ ID NO: 199 - RNA, 19 nt, Homo sapiens
  source 1..19: mol_type = unassigned RNA
tccaggcagagacaataaa

SEQ ID NO: 200 - RNA, 19 nt, Homo sapiens
  source 1..19: mol_type = unassigned RNA
tttattgtctctgcctgga

SEQ ID NO: 201 - RNA, 19 nt, Homo sapiens
  source 1..19: mol_type = unassigned RNA
gtgaaaggcacttttcatt

SEQ ID NO: 202 - RNA, 19 nt, Homo sapiens
  source 1..19: mol_type = unassigned RNA
aatgaaaagtgcctttcac

SEQ ID NO: 203 - RNA, 19 nt, Homo sapiens
  source 1..19: mol_type = unassigned RNA
tggactggtatttgtgtct

SEQ ID NO: 204 - RNA, 19 nt, Homo sapiens
  source 1..19: mol_type = unassigned RNA
agacacaaataccagtcca

SEQ ID NO: 205 - RNA, 19 nt, Homo sapiens
  source 1..19: mol_type = unassigned RNA
gtctgaggctggccctacg

SEQ ID NO: 206 - RNA, 19 nt, Homo sapiens
  source 1..19: mol_type = unassigned RNA
cgtagggccagcctcagac

SEQ ID NO: 207 - RNA, 19 nt, Homo sapiens
  source 1..19: mol_type = unassigned RNA
ctgaggctggccctacggg

SEQ ID NO: 208 - RNA, 19 nt, Homo sapiens
  source 1..19: mol_type = unassigned RNA
cccgtagggccagcctcag

SEQ ID NO: 209 - RNA, 19 nt, Homo sapiens
  source 1..19: mol_type = unassigned RNA
gaggctggccctacgggca

SEQ ID NO: 210 - RNA, 19 nt, Homo sapiens
  source 1..19: mol_type = unassigned RNA
tgcccgtagggccagcctc

SEQ ID NO: 211 - RNA, 19 nt, Homo sapiens
  source 1..19: mol_type = unassigned RNA
aggctggccctacgggcac

SEQ ID NO: 212 - RNA, 19 nt, Homo sapiens
  source 1..19: mol_type = unassigned RNA
gtgcccgtagggccagcct

SEQ ID NO: 213 - RNA, 19 nt, Homo sapiens
  source 1..19: mol_type = unassigned RNA
gctggccctacgggcaccg

SEQ ID NO: 214 - RNA, 19 nt, Homo sapiens
  source 1..19: mol_type = unassigned RNA
cggtgcccgtagggccagc

SEQ ID NO: 215 - RNA, 19 nt, Homo sapiens
  source 1..19: mol_type = unassigned RNA
ctggccctacgggcaccgg

SEQ ID NO: 216 - RNA, 19 nt, Homo sapiens
  source 1..19: mol_type = unassigned RNA
ccggtgcccgtagggccag

SEQ ID NO: 217 - RNA, 19 nt, Homo sapiens
  source 1..19: mol_type = unassigned RNA
ggccctacgggcaccggtg

SEQ ID NO: 218 - RNA, 19 nt, Homo sapiens
  source 1..19: mol_type = unassigned RNA
caccggtgcccgtagggcc

SEQ ID NO: 219 - RNA, 19 nt, Homo sapiens
  source 1..19: mol_type = unassigned RNA
ccactcattcttggcagga

SEQ ID NO: 220 - RNA, 19 nt, Homo sapiens
  source 1..19: mol_type = unassigned RNA
tcctgccaagaatgagtgg

SEQ ID NO: 221 - RNA, 19 nt, Homo sapiens
  source 1..19: mol_type = unassigned RNA
cctacgggcaccggtgaat

SEQ ID NO: 222 - RNA, 19 nt, Homo sapiens
  source 1..19: mol_type = unassigned RNA
attcaccggtgcccgtagg

SEQ ID NO: 223 - RNA, 19 nt, Homo sapiens
  source 1..19: mol_type = unassigned RNA
ctacgggcaccggtgaatc

SEQ ID NO: 224 - RNA, 19 nt, Homo sapiens
  source 1..19: mol_type = unassigned RNA
gattcaccggtgcccgtag

SEQ ID NO: 225 - RNA, 19 nt, Homo sapiens
  source 1..19: mol_type = unassigned RNA
tacgggcaccggtgaatcc

SEQ ID NO: 226 - RNA, 19 nt, Homo sapiens
  source 1..19: mol_type = unassigned RNA
ggattcaccggtgcccgta

SEQ ID NO: 227 - RNA, 19 nt, Homo sapiens
  source 1..19: mol_type = unassigned RNA
acgggcaccggtgaatcca

SEQ ID NO: 228 - RNA, 19 nt, Homo sapiens
  source 1..19: mol_type = unassigned RNA
tggattcaccggtgcccgt

SEQ ID NO: 229 - RNA, 19 nt, Homo sapiens
  source 1..19: mol_type = unassigned RNA
gcaccggtgaatccaagtg

SEQ ID NO: 230 - RNA, 19 nt, Homo sapiens
  source 1..19: mol_type = unassigned RNA
cacttggattcaccggtgc

SEQ ID NO: 231 - RNA, 19 nt, Homo sapiens
  source 1..19: mol_type = unassigned RNA
caccggtgaatccaagtgt

SEQ ID NO: 232 - RNA, 19 nt, Homo sapiens
  source 1..19: mol_type = unassigned RNA
acacttggattcaccggtg

SEQ ID NO: 233 - RNA, 19 nt, Homo sapiens
  source 1..19: mol_type = unassigned RNA
tgtggccatgcatgtgttc

SEQ ID NO: 234 - RNA, 19 nt, Homo sapiens
  source 1..19: mol_type = unassigned RNA
gaacacatgcatggccaca

SEQ ID NO: 235 - RNA, 19 nt, Homo sapiens
  source 1..19: mol_type = unassigned RNA
gtggccatgcatgtgttca

SEQ ID NO: 236 - RNA, 19 nt, Homo sapiens
  source 1..19: mol_type = unassigned RNA
tgaacacatgcatggccac

SEQ ID NO: 237 - RNA, 19 nt, Homo sapiens
  source 1..19: mol_type = unassigned RNA
gccatgcatgtgttcagaa

SEQ ID NO: 238 - RNA, 19 nt, Homo sapiens
  source 1..19: mol_type = unassigned RNA
ttctgaacacatgcatggc

SEQ ID NO: 239 - RNA, 19 nt, Homo sapiens
  source 1..19: mol_type = unassigned RNA
tattccaccacggctgtca

SEQ ID NO: 240 - RNA, 19 nt, Homo sapiens
  source 1..19: mol_type = unassigned RNA
tgacagccgtggtggaata

SEQ ID NO: 241 - RNA, 19 nt, Homo sapiens
  source 1..19: mol_type = unassigned RNA
gtcatcaccaatcccaagg

SEQ ID NO: 242 - RNA, 19 nt, Homo sapiens
  source 1..19: mol_type = unassigned RNA
ccttgggattggtgatgac

SEQ ID NO: 243 - RNA, 19 nt, Homo sapiens
  source 1..19: mol_type = unassigned RNA
gtcctctgatggtcaaagt

SEQ ID NO: 244 - RNA, 19 nt, Homo sapiens
  source 1..19: mol_type = unassigned RNA
actttgaccatcagaggac

SEQ ID NO: 245 - RNA, 19 nt, Homo sapiens
  source 1..19: mol_type = unassigned RNA
gatggtcaaagttctagat

SEQ ID NO: 246 - RNA, 19 nt, Homo sapiens
  source 1..19: mol_type = unassigned RNA
atctagaactttgaccatc

SEQ ID NO: 247 - RNA, 19 nt, Homo sapiens
  source 1..19: mol_type = unassigned RNA
atgctgtccgaggcagtcc

SEQ ID NO: 248 - RNA, 19 nt, Homo sapiens
  source 1..19: mol_type = unassigned RNA
ggactgcctcggacagcat

SEQ ID NO: 249 - RNA, 19 nt, Homo sapiens
  source 1..19: mol_type = unassigned RNA
ccgtgcatgtgttcagaaa

SEQ ID NO: 250 - RNA, 19 nt, Homo sapiens
  source 1..19: mol_type = unassigned RNA
tttctgaacacatgcacgg

SEQ ID NO: 251 - RNA, 19 nt, Homo sapiens
  source 1..19: mol_type = unassigned RNA
agtctggagagctgcatgg

SEQ ID NO: 252 - RNA, 19 nt, Homo sapiens
  source 1..19: mol_type = unassigned RNA
ccatgcagctctccagact

SEQ ID NO: 253 - RNA, 19 nt, Homo sapiens
  source 1..19: mol_type = unassigned RNA
catgggctcacaactgagg

SEQ ID NO: 254 - RNA, 19 nt, Homo sapiens
  source 1..19: mol_type = unassigned RNA
cctcagttgtgagcccatg

SEQ ID NO: 255 - RNA, 19 nt, Homo sapiens
  source 1..19: mol_type = unassigned RNA
tctcatcgtctgctcctcc

SEQ ID NO: 256 - RNA, 19 nt, Homo sapiens
  source 1..19: mol_type = unassigned RNA
ggaggagcagacgatgaga

SEQ ID NO: 257 - RNA, 19 nt, Homo sapiens
  source 1..19: mol_type = unassigned RNA
ccccattccatgagcatgc

SEQ ID NO: 258 - RNA, 19 nt, Homo sapiens
  source 1..19: mol_type = unassigned RNA
gcatgctcatggaatgggg

SEQ ID NO: 259 - RNA, 19 nt, Homo sapiens
  source 1..19: mol_type = unassigned RNA
gcccctactcctattccac

SEQ ID NO: 260 - RNA, 19 nt, Homo sapiens
  source 1..19: mol_type = unassigned RNA
gtggaataggagtaggggc

SEQ ID NO: 261 - RNA, 19 nt, Homo sapiens
  source 1..19: mol_type = unassigned RNA
ctattccaccacggctgtc

SEQ ID NO: 262 - RNA, 19 nt, Homo sapiens
  source 1..19: mol_type = unassigned RNA
gacagccgtggtggaatag

SEQ ID NO: 263 - RNA, 19 nt, Homo sapiens
  source 1..19: mol_type = unassigned RNA
cacggctgtcgtcaccaat

SEQ ID NO: 264 - RNA, 19 nt, Homo sapiens
  source 1..19: mol_type = unassigned RNA
attggtgacgacagccgtg

SEQ ID NO: 265 - RNA, 19 nt, Homo sapiens
  source 1..19: mol_type = unassigned RNA
aggacgagggatgggattt

SEQ ID NO: 266 - RNA, 19 nt, Homo sapiens
  source 1..19: mol_type = unassigned RNA
aaatcccatccctcgtcct

SEQ ID NO: 267 - RNA, 19 nt, Homo sapiens
  source 1..19: mol_type = unassigned RNA
tcacctcatatgctatgtt

SEQ ID NO: 268 - RNA, 19 nt, Homo sapiens
  source 1..19: mol_type = unassigned RNA
aacatagcatatgaggtga

SEQ ID NO: 269 - RNA, 19 nt, Homo sapiens
  source 1..19: mol_type = unassigned RNA
cctcatatgctatgttaga

SEQ ID NO: 270 - RNA, 19 nt, Homo sapiens
  source 1..19: mol_type = unassigned RNA
tctaacatagcatatgagg

SEQ ID NO: 271 - RNA, 19 nt, Homo sapiens
  source 1..19: mol_type = unassigned RNA
atgttagaagtccaggcag

SEQ ID NO: 272 - RNA, 19 nt, Homo sapiens
  source 1..19: mol_type = unassigned RNA
ctgcctggacttctaacat

SEQ ID NO: 273 - RNA, 19 nt, Homo sapiens
  source 1..19: mol_type = unassigned RNA
tctgaggctggccctacgg

SEQ ID NO: 274 - RNA, 19 nt, Homo sapiens
  source 1..19: mol_type = unassigned RNA
ccgtagggccagcctcaga

SEQ ID NO: 275 - RNA, 19 nt, Homo sapiens
  source 1..19: mol_type = unassigned RNA
ggccctacgggcaccggtg

SEQ ID NO: 276 - RNA, 19 nt, Homo sapiens
  source 1..19: mol_type = unassigned RNA
caccggtgcccgtagggcc

SEQ ID NO: 277 - RNA, 19 nt, Homo sapiens
  source 1..19: mol_type = unassigned RNA
gggcaccggtgaatccaag

SEQ ID NO: 278 - RNA, 19 nt, Homo sapiens
  source 1..19: mol_type = unassigned RNA
cttggattcaccggtgccc

SEQ ID NO: 279 - RNA, 19 nt, Homo sapiens
  source 1..19: mol_type = unassigned RNA
ccatgcatgtgttcagaaa

SEQ ID NO: 280 - RNA, 19 nt, Homo sapiens
  source 1..19: mol_type = unassigned RNA
tttctgaacacatgcatgg

SEQ ID NO: 281 - RNA, 21 nt, Homo sapiens
  source 1..21: mol_type = unassigned RNA
  misc_difference 20: note = modified_base - a, c, t, g, unknown or other - adenine, cytosine, thymine, or guanine
  misc_difference 21: note = modified_base - a, c, t, g, unknown or other - adenine, cytosine, thymine, or guanine
ccggtgaatccaagtgtccnn

SEQ ID NO: 282 - RNA, 21 nt, Homo sapiens
  source 1..21: mol_type = unassigned RNA
  misc_difference 20: note = modified_base - a, c, t, g, unknown or other - adenine, cytosine, thymine, or guanine
  misc_difference 21: note = modified_base - a, c, t, g, unknown or other - adenine, cytosine, thymine, or guanine
ggacacttggattcaccggnn

SEQ ID NO: 283 - RNA, 21 nt, Homo sapiens
  source 1..21: mol_type = unassigned RNA
  misc_difference 20: note = modified_base - a, c, t, g, unknown or other - adenine, cytosine, thymine, or guanine
  misc_difference 21: note = modified_base - a, c, t, g, unknown or other - adenine, cytosine, thymine, or guanine
actcattcttggcaggatgnn

SEQ ID NO: 284 - RNA, 21 nt, Homo sapiens
  source 1..21: mol_type = unassigned RNA
  misc_difference 20: note = modified_base - a, c, t, g, unknown or other - adenine, cytosine, thymine, or guanine
  misc_difference 21: note = modified_base - a, c, t, g, unknown or other - adenine, cytosine, thymine, or guanine
catcctgccaagaatgagtnn

SEQ ID NO: 285 - RNA, 21 nt, Homo sapiens
  source 1..21: mol_type = unassigned RNA
  misc_difference 20: note = modified_base - a, c, t, g, unknown or other - adenine, cytosine, thymine, or guanine
  misc_difference 21: note = modified_base - a, c, t, g, unknown or other - adenine, cytosine, thymine, or guanine
aagtgtcctctgatggtcann

SEQ ID NO: 286 - RNA, 21 nt, Homo sapiens
  source 1..21: mol_type = unassigned RNA
  misc_difference 20: note = modified_base - a, c, t, g, unknown or other - adenine, cytosine, thymine, or guanine
  misc_difference 21: note = modified_base - a, c, t, g, unknown or other - adenine, cytosine, thymine, or guanine
tgaccatcagaggacacttnn

SEQ ID NO: 287 - RNA, 21 nt, Homo sapiens
  source 1..21: mol_type = unassigned RNA
  misc_difference 20: note = modified_base - a, c, t, g, unknown or other - adenine, cytosine, thymine, or guanine
  misc_difference 21: note = modified_base - a, c, t, g, unknown or other - adenine, cytosine, thymine, or guanine
tcattcttggcaggatggcnn

SEQ ID NO: 288 - RNA, 21 nt, Homo sapiens
  source 1..21: mol_type = unassigned RNA
  misc_difference 20: note = modified_base - a, c, t, g, unknown or other - adenine, cytosine, thymine, or guanine
  misc_difference 21: note = modified_base - a, c, t, g, unknown or other - adenine, cytosine, thymine, or guanine
gccatcctgccaagaatgann

SEQ ID NO: 289 - RNA, 21 nt, Homo sapiens
  source 1..21: mol_type = unassigned RNA
  misc_difference 20: note = modified_base - a, c, t, g, unknown or other - adenine, cytosine, thymine, or guanine
  misc_difference 21: note = modified_base - a, c, t, g, unknown or other - adenine, cytosine, thymine, or guanine
aagttctagatgctgtccgnn

SEQ ID NO: 290 - RNA, 21 nt, Homo sapiens
  source 1..21: mol_type = unassigned RNA
  misc_difference 20: note = modified_base - a, c, t, g, unknown or other - adenine, cytosine, thymine, or guanine
  misc_difference 21: note = modified_base - a, c, t, g, unknown or other - adenine, cytosine, thymine, or guanine
cggacagcatctagaacttnn

SEQ ID NO: 291 - RNA, 21 nt, Homo sapiens
  source 1..21: mol_type = unassigned RNA
  misc_difference 20: note = modified_base - a, c, t, g, unknown or other - adenine, cytosine, thymine, or guanine
  misc_difference 21: note = modified_base - a, c, t, g, unknown or other - adenine, cytosine, thymine, or guanine
gttctagatgctgtccgagnn

SEQ ID NO: 292 - RNA, 21 nt, Homo sapiens
  source 1..21: mol_type = unassigned RNA
  misc_difference 20: note = modified_base - a, c, t, g, unknown or other - adenine, cytosine, thymine, or guanine
  misc_difference 21: note = modified_base - a, c, t, g, unknown or other - adenine, cytosine, thymine, or guanine
ctcggacagcatctagaacnn

SEQ ID NO: 293 - RNA, 21 nt, Homo sapiens
  source 1..21: mol_type = unassigned RNA
  misc_difference 20: note = modified_base - a, c, t, g, unknown or other - adenine, cytosine, thymine, or guanine
  misc_difference 21: note = modified_base - a, c, t, g, unknown or other - adenine, cytosine, thymine, or guanine
ctagatgctgtccgaggcann

SEQ ID NO: 294 - RNA, 21 nt, Homo sapiens
  source 1..21: mol_type = unassigned RNA
  misc_difference 20: note = modified_base - a, c, t, g, unknown or other - adenine, cytosine, thymine, or guanine
  misc_difference 21: note = modified_base - a, c, t, g, unknown or other - adenine, cytosine, thymine, or guanine
tgcctcggacagcatctagnn

SEQ ID NO: 295 - RNA, 21 nt, Homo sapiens
  source 1..21: mol_type = unassigned RNA
  misc_difference 20: note = modified_base - a, c, t, g, unknown or other - adenine, cytosine, thymine, or guanine
  misc_difference 21: note = modified_base - a, c, t, g, unknown or other - adenine, cytosine, thymine, or guanine
gatgctgtccgaggcagtcnn

SEQ ID NO: 296 - RNA, 21 nt, Homo sapiens
  source 1..21: mol_type = unassigned RNA
  misc_difference 20: note = modified_base - a, c, t, g, unknown or other - adenine, cytosine, thymine, or guanine
  misc_difference 21: note = modified_base - a, c, t, g, unknown or other - adenine, cytosine, thymine, or guanine
gactgcctcggacagcatcnn

SEQ ID NO: 297 - RNA, 21 nt, Homo sapiens
  source 1..21: mol_type = unassigned RNA
  misc_difference 20: note = modified_base - a, c, t, g, unknown or other - adenine, cytosine, thymine, or guanine
  misc_difference 21: note = modified_base - a, c, t, g, unknown or other - adenine, cytosine, thymine, or guanine
cattcttggcaggatggctnn

SEQ ID NO: 298 - RNA, 21 nt, Homo sapiens
  source 1..21: mol_type = unassigned RNA
  misc_difference 20: note = modified_base - a, c, t, g, unknown or other - adenine, cytosine, thymine, or guanine
  misc_difference 21: note = modified_base - a, c, t, g, unknown or other - adenine, cytosine, thymine, or guanine
agccatcctgccaagaatgnn

SEQ ID NO: 299 - RNA, 21 nt, Homo sapiens
  source 1..21: mol_type = unassigned RNA
  misc_difference 20: note = modified_base - a, c, t, g, unknown or other - adenine, cytosine, thymine, or guanine
  misc_difference 21: note = modified_base - a, c, t, g, unknown or other - adenine, cytosine, thymine, or guanine
tgctgtccgaggcagtcctnn

SEQ ID NO: 300 - RNA, 21 nt, Homo sapiens
  source 1..21: mol_type = unassigned RNA
  misc_difference 20: note = modified_base - a, c, t, g, unknown or other - adenine, cytosine, thymine, or guanine
  misc_difference 21: note = modified_base - a, c, t, g, unknown or other - adenine, cytosine, thymine, or guanine
aggactgcctcggacagcann

SEQ ID NO: 301 - RNA, 21 nt, Homo sapiens
  source 1..21: mol_type = unassigned RNA
  misc_difference 20: note = modified_base - a, c, t, g, unknown or other - adenine, cytosine, thymine, or guanine
  misc_difference 21: note = modified_base - a, c, t, g, unknown or other - adenine, cytosine, thymine, or guanine
ccgaggcagtcctgccatcnn

SEQ ID NO: 302 - RNA, 21 nt, Homo sapiens
  source 1..21: mol_type = unassigned RNA
  misc_difference 20: note = modified_base - a, c, t, g, unknown or other - adenine, cytosine, thymine, or guanine
  misc_difference 21: note = modified_base - a, c, t, g, unknown or other - adenine, cytosine, thymine, or guanine
gatggcaggactgcctcggnn

SEQ ID NO: 303 - RNA, 21 nt, Homo sapiens
  source 1..21: mol_type = unassigned RNA
  misc_difference 20: note = modified_base - a, c, t, g, unknown or other - adenine, cytosine, thymine, or guanine
  misc_difference 21: note = modified_base - a, c, t, g, unknown or other - adenine, cytosine, thymine, or guanine
cagtcctgccatcaatgtgnn

SEQ ID NO: 304 - RNA, 21 nt, Homo sapiens
  source 1..21: mol_type = unassigned RNA
  misc_difference 20: note = modified_base - a, c, t, g, unknown or other - adenine, cytosine, thymine, or guanine
  misc_difference 21: note = modified_base - a, c, t, g, unknown or other - adenine, cytosine, thymine, or guanine
cacattgatggcaggactgnn

SEQ ID NO: 305 - RNA, 21 nt, Homo sapiens
  source 1..21: mol_type = unassigned RNA
  misc_difference 20: note = modified_base - a, c, t, g, unknown or other - adenine, cytosine, thymine, or guanine
  misc_difference 21: note = modified_base - a, c, t, g, unknown or other - adenine, cytosine, thymine, or guanine
caatgtggccgtgcatgtgnn

SEQ ID NO: 306 - RNA, 21 nt, Homo sapiens
  source 1..21: mol_type = unassigned RNA
  misc_difference 20: note = modified_base - a, c, t, g, unknown or other - adenine, cytosine, thymine, or guanine
  misc_difference 21: note = modified_base - a, c, t, g, unknown or other - adenine, cytosine, thymine, or guanine
cacatgcacggccacattgnn

SEQ ID NO: 307 - RNA, 21 nt, Homo sapiens
  source 1..21: mol_type = unassigned RNA
  misc_difference 20: note = modified_base - a, c, t, g, unknown or other - adenine, cytosine, thymine, or guanine
  misc_difference 21: note = modified_base - a, c, t, g, unknown or other - adenine, cytosine, thymine, or guanine
atgtgttcagaaaggctgcnn

SEQ ID NO: 308 - RNA, 21 nt, Homo sapiens
  source 1..21: mol_type = unassigned RNA
  misc_difference 20: note = modified_base - a, c, t, g, unknown or other - adenine, cytosine, thymine, or guanine
  misc_difference 21: note = modified_base - a, c, t, g, unknown or other - adenine, cytosine, thymine, or guanine
gcagcctttctgaacacatnn

SEQ ID NO: 309 - RNA, 21 nt, Homo sapiens
  source 1..21: mol_type = unassigned RNA
  misc_difference 20: note = modified_base - a, c, t, g, unknown or other - adenine, cytosine, thymine, or guanine
  misc_difference 21: note = modified_base - a, c, t, g, unknown or other - adenine, cytosine, thymine, or guanine
cagaagtccactcattcttnn

SEQ ID NO: 310 - RNA, 21 nt, Homo sapiens
  source 1..21: mol_type = unassigned RNA
  misc_difference 20: note = modified_base - a, c, t, g, unknown or other - adenine, cytosine, thymine, or guanine
  misc_difference 21: note = modified_base - a, c, t, g, unknown or other - adenine, cytosine, thymine, or guanine
aagaatgagtggacttctgnn

SEQ ID NO: 311 - RNA, 21 nt, Homo sapiens
  source 1..21: mol_type = unassigned RNA
  misc_difference 20: note = modified_base - a, c, t, g, unknown or other - adenine, cytosine, thymine, or guanine
  misc_difference 21: note = modified_base - a, c, t, g, unknown or other - adenine, cytosine, thymine, or guanine
ggcaggatggcttctcatcnn

SEQ ID NO: 312 - RNA, 21 nt, Homo sapiens
  source 1..21: mol_type = unassigned RNA
  misc_difference 20: note = modified_base - a, c, t, g, unknown or other - adenine, cytosine, thymine, or guanine
  misc_difference 21: note = modified_base - a, c, t, g, unknown or other - adenine, cytosine, thymine, or guanine
gatgagaagccatcctgccnn

SEQ ID NO: 313 - RNA, 21 nt, Homo sapiens
  source 1..21: mol_type = unassigned RNA
  misc_difference 20: note = modified_base - a, c, t, g, unknown or other - adenine, cytosine, thymine, or guanine
  misc_difference 21: note = modified_base - a, c, t, g, unknown or other - adenine, cytosine, thymine, or guanine
gagccatttgcctctgggann

SEQ ID NO: 314 - RNA, 21 nt, Homo sapiens
  source 1..21: mol_type = unassigned RNA
  misc_difference 20: note = modified_base - a, c, t, g, unknown or other - adenine, cytosine, thymine, or guanine
  misc_difference 21: note = modified_base - a, c, t, g, unknown or other - adenine, cytosine, thymine, or guanine
tcccagaggcaaatggctcnn

SEQ ID NO: 315 - RNA, 21 nt, Homo sapiens
  source 1..21: mol_type = unassigned RNA
  misc_difference 20: note = modified_base - a, c, t, g, unknown or other - adenine, cytosine, thymine, or guanine
  misc_difference 21: note = modified_base - a, c, t, g, unknown or other - adenine, cytosine, thymine, or guanine
caggatggcttctcatcgtnn

SEQ ID NO: 316 - RNA, 21 nt, Homo sapiens
  source 1..21: mol_type = unassigned RNA
  misc_difference 20: note = modified_base - a, c, t, g, unknown or other - adenine, cytosine, thymine, or guanine
  misc_difference 21: note = modified_base - a, c, t, g, unknown or other - adenine, cytosine, thymine, or guanine
acgatgagaagccatcctgnn

SEQ ID NO: 317 - RNA, 21 nt, Homo sapiens
  source 1..21: mol_type = unassigned RNA
  misc_difference 20: note = modified_base - a, c, t, g, unknown or other - adenine, cytosine, thymine, or guanine
  misc_difference 21: note = modified_base - a, c, t, g, unknown or other - adenine, cytosine, thymine, or guanine
aggatggcttctcatcgtcnn

SEQ ID NO: 318 - RNA, 21 nt, Homo sapiens
  source 1..21: mol_type = unassigned RNA
  misc_difference 20: note = modified_base - a, c, t, g, unknown or other - adenine, cytosine, thymine, or guanine
  misc_difference 21: note = modified_base - a, c, t, g, unknown or other - adenine, cytosine, thymine, or guanine
gacgatgagaagccatcctnn

SEQ ID NO: 319 - RNA, 21 nt, Homo sapiens
  source 1..21: mol_type = unassigned RNA
  misc_difference 20: note = modified_base - a, c, t, g, unknown or other - adenine, cytosine, thymine, or guanine
  misc_difference 21: note = modified_base - a, c, t, g, unknown or other - adenine, cytosine, thymine, or guanine
agagctgcatgggctcacann

SEQ ID NO: 320 - RNA, 21 nt, Homo sapiens
  source 1..21: mol_type = unassigned RNA
  misc_difference 20: note = modified_base - a, c, t, g, unknown or other - adenine, cytosine, thymine, or guanine
  misc_difference 21: note = modified_base - a, c, t, g, unknown or other - adenine, cytosine, thymine, or guanine
tgtgagcccatgcagctctnn

SEQ ID NO: 321 - RNA, 21 nt, Homo sapiens
  source 1..21: mol_type = unassigned RNA
  misc_difference 20: note = modified_base - a, c, t, g, unknown or other - adenine, cytosine, thymine, or guanine
  misc_difference 21: note = modified_base - a, c, t, g, unknown or other - adenine, cytosine, thymine, or guanine
gctgcatgggctcacaactnn

SEQ ID NO: 322 - RNA, 21 nt, Homo sapiens
  source 1..21: mol_type = unassigned RNA
  misc_difference 20: note = modified_base - a, c, t, g, unknown or other - adenine, cytosine, thymine, or guanine
  misc_difference 21: note = modified_base - a, c, t, g, unknown or other - adenine, cytosine, thymine, or guanine
agttgtgagcccatgcagcnn

SEQ ID NO: 323 - RNA, 21 nt, Homo sapiens
  source 1..21: mol_type = unassigned RNA
  misc_difference 20: note = modified_base - a, c, t, g, unknown or other - adenine, cytosine, thymine, or guanine
  misc_difference 21: note = modified_base - a, c, t, g, unknown or other - adenine, cytosine, thymine, or guanine
ggatggcttctcatcgtctnn

SEQ ID NO: 324 - RNA, 21 nt, Homo sapiens
  source 1..21: mol_type = unassigned RNA
  misc_difference 20: note = modified_base - a, c, t, g, unknown or other - adenine, cytosine, thymine, or guanine
  misc_difference 21: note = modified_base - a, c, t, g, unknown or other - adenine, cytosine, thymine, or guanine
agacgatgagaagccatccnn

SEQ ID NO: 325 - RNA, 21 nt, Homo sapiens
  source 1..21: mol_type = unassigned RNA
  misc_difference 20: note = modified_base - a, c, t, g, unknown or other - adenine, cytosine, thymine, or guanine
  misc_difference 21: note = modified_base - a, c, t, g, unknown or other - adenine, cytosine, thymine, or guanine
gcatgggctcacaactgagnn

SEQ ID NO: 326 - RNA, 21 nt, Homo sapiens
  source 1..21: mol_type = unassigned RNA
  misc_difference 20: note = modified_base - a, c, t, g, unknown or other - adenine, cytosine, thymine, or guanine
  misc_difference 21: note = modified_base - a, c, t, g, unknown or other - adenine, cytosine, thymine, or guanine
ctcagttgtgagcccatgcnn

SEQ ID NO: 327 - RNA, 21 nt, Homo sapiens
  source 1..21: mol_type = unassigned RNA
  misc_difference 20: note = modified_base - a, c, t, g, unknown or other - adenine, cytosine, thymine, or guanine
  misc_difference 21: note = modified_base - a, c, t, g, unknown or other - adenine, cytosine, thymine, or guanine
atgggctcacaactgaggann

SEQ ID NO: 328 - RNA, 21 nt, Homo sapiens
  source 1..21: mol_type = unassigned RNA
  misc_difference 20: note = modified_base - a, c, t, g, unknown or other - adenine, cytosine, thymine, or guanine
  misc_difference 21: note = modified_base - a, c, t, g, unknown or other - adenine, cytosine, thymine, or guanine
tcctcagttgtgagcccatnn

SEQ ID NO: 329 - RNA, 21 nt, Homo sapiens
  source 1..21: mol_type = unassigned RNA
  misc_difference 20: note = modified_base - a, c, t, g, unknown or other - adenine, cytosine, thymine, or guanine
  misc_difference 21: note = modified_base - a, c, t, g, unknown or other - adenine, cytosine, thymine, or guanine
tgggctcacaactgaggagnn

SEQ ID NO: 330 - RNA, 21 nt, Homo sapiens
  source 1..21: mol_type = unassigned RNA
  misc_difference 20: note = modified_base - a, c, t, g, unknown or other - adenine, cytosine, thymine, or guanine
  misc_difference 21: note = modified_base - a, c, t, g, unknown or other - adenine, cytosine, thymine, or guanine
ctcctcagttgtgagcccann

SEQ ID NO: 331 - RNA, 21 nt, Homo sapiens
  source 1..21: mol_type = unassigned RNA
  misc_difference 20: note = modified_base - a, c, t, g, unknown or other - adenine, cytosine, thymine, or guanine
  misc_difference 21: note = modified_base - a, c, t, g, unknown or other - adenine, cytosine, thymine, or guanine
gaggaatttgtagaagggann

SEQ ID NO: 332 - RNA, 21 nt, Homo sapiens
  source 1..21: mol_type = unassigned RNA
  misc_difference 20: note = modified_base - a, c, t, g, unknown or other - adenine, cytosine, thymine, or guanine
  misc_difference 21: note = modified_base - a, c, t, g, unknown or other - adenine, cytosine, thymine, or guanine
tcccttctacaaattcctcnn

SEQ ID NO: 333 - RNA, 21 nt, Homo sapiens
  source 1..21: mol_type = unassigned RNA
  misc_difference 20: note = modified_base - a, c, t, g, unknown or other - adenine, cytosine, thymine, or guanine
  misc_difference 21: note = modified_base - a, c, t, g, unknown or other - adenine, cytosine, thymine, or guanine
tttgtagaagggatatacann

SEQ ID NO: 334 - RNA, 21 nt, Homo sapiens
  source 1..21: mol_type = unassigned RNA
  misc_difference 20: note = modified_base - a, c, t, g, unknown or other - adenine, cytosine, thymine, or guanine
  misc_difference 21: note = modified_base - a, c, t, g, unknown or other - adenine, cytosine, thymine, or guanine
tgtatatcccttctacaaann

SEQ ID NO: 335 - RNA, 21 nt, Homo sapiens
  source 1..21: mol_type = unassigned RNA
  misc_difference 20: note = modified_base - a, c, t, g, unknown or other - adenine, cytosine, thymine, or guanine
  misc_difference 21: note = modified_base - a, c, t, g, unknown or other - adenine, cytosine, thymine, or guanine
ttgtagaagggatatacaann

SEQ ID NO: 336 - RNA, 21 nt, Homo sapiens
  source 1..21: mol_type = unassigned RNA
  misc_difference 20: note = modified_base - a, c, t, g, unknown or other - adenine, cytosine, thymine, or guanine
  misc_difference 21: note = modified_base - a, c, t, g, unknown or other - adenine, cytosine, thymine, or guanine
ttgtatatcccttctacaann

SEQ ID NO: 337 - RNA, 21 nt, Homo sapiens
  source 1..21: mol_type = unassigned RNA
  misc_difference 20: note = modified_base - a, c, t, g, unknown or other - adenine, cytosine, thymine, or guanine
  misc_difference 21: note = modified_base - a, c, t, g, unknown or other - adenine, cytosine, thymine, or guanine
tgtagaagggatatacaaann

SEQ ID NO: 338 - RNA, 21 nt, Homo sapiens
  source 1..21: mol_type = unassigned RNA
  misc_difference 20: note = modified_base - a, c, t, g, unknown or other - adenine, cytosine, thymine, or guanine
  misc_difference 21: note = modified_base - a, c, t, g, unknown or other - adenine, cytosine, thymine, or guanine
tttgtatatcccttctacann

SEQ ID NO: 339 - RNA, 21 nt, Homo sapiens
  source 1..21: mol_type = unassigned RNA
  misc_difference 20: note = modified_base - a, c, t, g, unknown or other - adenine, cytosine, thymine, or guanine
  misc_difference 21: note = modified_base - a, c, t, g, unknown or other - adenine, cytosine, thymine, or guanine
agaagggatatacaaagtgnn

SEQ ID NO: 340 - RNA, 21 nt, Homo sapiens
  source 1..21: mol_type = unassigned RNA
  misc_difference 20: note = modified_base - a, c, t, g, unknown or other - adenine, cytosine, thymine, or guanine
  misc_difference 21: note = modified_base - a, c, t, g, unknown or other - adenine, cytosine, thymine, or guanine
cactttgtatatcccttctnn

SEQ ID NO: 341 - RNA, 21 nt, Homo sapiens
  source 1..21: mol_type = unassigned RNA
  misc_difference 20: note = modified_base - a, c, t, g, unknown or other - adenine, cytosine, thymine, or guanine
  misc_difference 21: note = modified_base - a, c, t, g, unknown or other - adenine, cytosine, thymine, or guanine
aagtggaaatagacaccaann

SEQ ID NO: 342 - RNA, 21 nt, Homo sapiens
  source 1..21: mol_type = unassigned RNA
  misc_difference 20: note = modified_base - a, c, t, g, unknown or other - adenine, cytosine, thymine, or guanine
  misc_difference 21: note = modified_base - a, c, t, g, unknown or other - adenine, cytosine, thymine, or guanine
ttggtgtctatttccacttnn

SEQ ID NO: 343 - RNA, 21 nt, Homo sapiens
  source 1..21: mol_type = unassigned RNA
  misc_difference 20: note = modified_base - a, c, t, g, unknown or other - adenine, cytosine, thymine, or guanine
  misc_difference 21: note = modified_base - a, c, t, g, unknown or other - adenine, cytosine, thymine, or guanine
ggaaatagacaccaaatctnn

SEQ ID NO: 344 - RNA, 21 nt, Homo sapiens
  source 1..21: mol_type = unassigned RNA
  misc_difference 20: note = modified_base - a, c, t, g, unknown or other - adenine, cytosine, thymine, or guanine
  misc_difference 21: note = modified_base - a, c, t, g, unknown or other - adenine, cytosine, thymine, or guanine
agatttggtgtctatttccnn

SEQ ID NO: 345 - RNA, 21 nt, Homo sapiens
  source 1..21: mol_type = unassigned RNA
  misc_difference 20: note = modified_base - a, c, t, g, unknown or other - adenine, cytosine, thymine, or guanine
  misc_difference 21: note = modified_base - a, c, t, g, unknown or other - adenine, cytosine, thymine, or guanine
gaaatagacaccaaatcttnn

SEQ ID NO: 346 - RNA, 21 nt, Homo sapiens
  source 1..21: mol_type = unassigned RNA
  misc_difference 20: note = modified_base - a, c, t, g, unknown or other - adenine, cytosine, thymine, or guanine
  misc_difference 21: note = modified_base - a, c, t, g, unknown or other - adenine, cytosine, thymine, or guanine
aagatttggtgtctatttcnn

SEQ ID NO: 347 - RNA, 21 nt, Homo sapiens
  source 1..21: mol_type = unassigned RNA
  misc_difference 20: note = modified_base - a, c, t, g, unknown or other - adenine, cytosine, thymine, or guanine
  misc_difference 21: note = modified_base - a, c, t, g, unknown or other - adenine, cytosine, thymine, or guanine
atagacaccaaatcttactnn

SEQ ID NO: 348 - RNA, 21 nt, Homo sapiens
  source 1..21: mol_type = unassigned RNA
  misc_difference 20: note = modified_base - a, c, t, g, unknown or other - adenine, cytosine, thymine, or guanine
  misc_difference 21: note = modified_base - a, c, t, g, unknown or other - adenine, cytosine, thymine, or guanine
agtaagatttggtgtctatnn

SEQ ID NO: 349 - RNA, 21 nt, Homo sapiens
  source 1..21: mol_type = unassigned RNA
  misc_difference 20: note = modified_base - a, c, t, g, unknown or other - adenine, cytosine, thymine, or guanine
  misc_difference 21: note = modified_base - a, c, t, g, unknown or other - adenine, cytosine, thymine, or guanine
tagacaccaaatcttactgnn

SEQ ID NO: 350 - RNA, 21 nt, Homo sapiens
  source 1..21: mol_type = unassigned RNA
  misc_difference 20: note = modified_base - a, c, t, g, unknown or other - adenine, cytosine, thymine, or guanine
  misc_difference 21: note = modified_base - a, c, t, g, unknown or other - adenine, cytosine, thymine, or guanine
cagtaagatttggtgtctann

SEQ ID NO: 351 - RNA, 21 nt, Homo sapiens
  source 1..21: mol_type = unassigned RNA
  misc_difference 20: note = modified_base - a, c, t, g, unknown or other - adenine, cytosine, thymine, or guanine
  misc_difference 21: note = modified_base - a, c, t, g, unknown or other - adenine, cytosine, thymine, or guanine
agacaccaaatcttactggnn

SEQ ID NO: 352 - RNA, 21 nt, Homo sapiens
  source 1..21: mol_type = unassigned RNA
  misc_difference 20: note = modified_base - a, c, t, g, unknown or other - adenine, cytosine, thymine, or guanine
  misc_difference 21: note = modified_base - a, c, t, g, unknown or other - adenine, cytosine, thymine, or guanine
ccagtaagatttggtgtctnn

SEQ ID NO: 353 - RNA, 21 nt, Homo sapiens
  source 1..21: mol_type = unassigned RNA
  misc_difference 20: note = modified_base - a, c, t, g, unknown or other - adenine, cytosine, thymine, or guanine
  misc_difference 21: note = modified_base - a, c, t, g, unknown or other - adenine, cytosine, thymine, or guanine
ttactggaaggcacttggcnn

SEQ ID NO: 354 - RNA, 21 nt, Homo sapiens
  source 1..21: mol_type = unassigned RNA
  misc_difference 20: note = modified_base - a, c, t, g, unknown or other - adenine, cytosine, thymine, or guanine
  misc_difference 21: note = modified_base - a, c, t, g, unknown or other - adenine, cytosine, thymine, or guanine
gccaagtgccttccagtaann

SEQ ID NO: 355 - RNA, 21 nt, Homo sapiens
  source 1..21: mol_type = unassigned RNA
  misc_difference 20: note = modified_base - a, c, t, g, unknown or other - adenine, cytosine, thymine, or guanine
  misc_difference 21: note = modified_base - a, c, t, g, unknown or other - adenine, cytosine, thymine, or guanine
ttctcatcgtctgctcctcnn

SEQ ID NO: 356 - RNA, 21 nt, Homo sapiens
  source 1..21: mol_type = unassigned RNA
  misc_difference 20: note = modified_base - a, c, t, g, unknown or other - adenine, cytosine, thymine, or guanine
  misc_difference 21: note = modified_base - a, c, t, g, unknown or other - adenine, cytosine, thymine, or guanine
gaggagcagacgatgagaann

SEQ ID NO: 357 - RNA, 21 nt, Homo sapiens
  source 1..21: mol_type = unassigned RNA
  misc_difference 20: note = modified_base - a, c, t, g, unknown or other - adenine, cytosine, thymine, or guanine
  misc_difference 21: note = modified_base - a, c, t, g, unknown or other - adenine, cytosine, thymine, or guanine
ggaaggcacttggcatctcnn

SEQ ID NO: 358 - RNA, 21 nt, Homo sapiens
  source 1..21: mol_type = unassigned RNA
  misc_difference 20: note = modified_base - a, c, t, g, unknown or other - adenine, cytosine, thymine, or guanine
  misc_difference 21: note = modified_base - a, c, t, g, unknown or other - adenine, cytosine, thymine, or guanine
gagatgccaagtgccttccnn

SEQ ID NO: 359 - RNA, 21 nt, Homo sapiens
  source 1..21: mol_type = unassigned RNA
  misc_difference 20: note = modified_base - a, c, t, g, unknown or other - adenine, cytosine, thymine, or guanine
  misc_difference 21: note = modified_base - a, c, t, g, unknown or other - adenine, cytosine, thymine, or guanine
ggcacttggcatctccccann

SEQ ID NO: 360 - RNA, 21 nt, Homo sapiens
  source 1..21: mol_type = unassigned RNA
  misc_difference 20: note = modified_base - a, c, t, g, unknown or other - adenine, cytosine, thymine, or guanine
  misc_difference 21: note = modified_base - a, c, t, g, unknown or other - adenine, cytosine, thymine, or guanine
tggggagatgccaagtgccnn

SEQ ID NO: 361 - RNA, 21 nt, Homo sapiens
  source 1..21: mol_type = unassigned RNA
  misc_difference 20: note = modified_base - a, c, t, g, unknown or other - adenine, cytosine, thymine, or guanine
  misc_difference 21: note = modified_base - a, c, t, g, unknown or other - adenine, cytosine, thymine, or guanine
ggcatctccccattccatgnn

SEQ ID NO: 362 - RNA, 22 nt, Homo sapiens
  source 1..22: mol_type = unassigned RNA
  modified_base 19: mod_base = OTHER; note = Thymine
  modified_base 20: mod_base = OTHER; note = Thymine
  misc_difference 21: note = modified_base - a, c, t, g, unknown or other - adenine, cytosine, thymine, or guanine
  misc_difference 22: note = modified_base - a, c, t, g, unknown or other - adenine, cytosine, thymine, or guanine
atggaatggggagatgccttnn

SEQ ID NO: 363 - RNA, 21 nt, Homo sapiens
  source 1..21: mol_type = unassigned RNA
  misc_difference 20: note = modified_base - a, c, t, g, unknown or other - adenine, cytosine, thymine, or guanine
  misc_difference 21: note = modified_base - a, c, t, g, unknown or other - adenine, cytosine, thymine, or guanine
gcatctccccattccatgann

SEQ ID NO: 364 - RNA, 21 nt, Homo sapiens
  source 1..21: mol_type = unassigned RNA
  misc_difference 20: note = modified_base - a, c, t, g, unknown or other - adenine, cytosine, thymine, or guanine
  misc_difference 21: note = modified_base - a, c, t, g, unknown or other - adenine, cytosine, thymine, or guanine
tcatggaatggggagatgcnn

SEQ ID NO: 365 - RNA, 21 nt, Homo sapiens
  source 1..21: mol_type = unassigned RNA
  misc_difference 20: note = modified_base - a, c, t, g, unknown or other - adenine, cytosine, thymine, or guanine
  misc_difference 21: note = modified_base - a, c, t, g, unknown or other - adenine, cytosine, thymine, or guanine
catctccccattccatgagnn

SEQ ID NO: 366 - RNA, 21 nt, Homo sapiens
  source 1..21: mol_type = unassigned RNA
  misc_difference 20: note = modified_base - a, c, t, g, unknown or other - adenine, cytosine, thymine, or guanine
  misc_difference 21: note = modified_base - a, c, t, g, unknown or other - adenine, cytosine, thymine, or guanine
ctcatggaatggggagatgnn

SEQ ID NO: 367 - RNA, 21 nt, Homo sapiens
  source 1..21: mol_type = unassigned RNA
  misc_difference 20: note = modified_base - a, c, t, g, unknown or other - adenine, cytosine, thymine, or guanine
  misc_difference 21: note = modified_base - a, c, t, g, unknown or other - adenine, cytosine, thymine, or guanine
atctccccattccatgagcnn

SEQ ID NO: 368 - RNA, 21 nt, Homo sapiens
  source 1..21: mol_type = unassigned RNA
  misc_difference 20: note = modified_base - a, c, t, g, unknown or other - adenine, cytosine, thymine, or guanine
  misc_difference 21: note = modified_base - a, c, t, g, unknown or other - adenine, cytosine, thymine, or guanine
gctcatggaatggggagatnn

SEQ ID NO: 369 - RNA, 21 nt, Homo sapiens
  source 1..21: mol_type = unassigned RNA
  misc_difference 20: note = modified_base - a, c, t, g, unknown or other - adenine, cytosine, thymine, or guanine
  misc_difference 21: note = modified_base - a, c, t, g, unknown or other - adenine, cytosine, thymine, or guanine
ctccccattccatgagcatnn

SEQ ID NO: 370 - RNA, 21 nt, Homo sapiens
  source 1..21: mol_type = unassigned RNA
  misc_difference 20: note = modified_base - a, c, t, g, unknown or other - adenine, cytosine, thymine, or guanine
  misc_difference 21: note = modified_base - a, c, t, g, unknown or other - adenine, cytosine, thymine, or guanine
atgctcatggaatggggagnn

SEQ ID NO: 371 - RNA, 21 nt, Homo sapiens
  source 1..21: mol_type = unassigned RNA
  misc_difference 20: note = modified_base - a, c, t, g, unknown or other - adenine, cytosine, thymine, or guanine
  misc_difference 21: note = modified_base - a, c, t, g, unknown or other - adenine, cytosine, thymine, or guanine
cccattccatgagcatgcann

SEQ ID NO: 372 - RNA, 21 nt, Homo sapiens
  source 1..21: mol_type = unassigned RNA
  misc_difference 20: note = modified_base - a, c, t, g, unknown or other - adenine, cytosine, thymine, or guanine
  misc_difference 21: note = modified_base - a, c, t, g, unknown or other - adenine, cytosine, thymine, or guanine
tgcatgctcatggaatgggnn

SEQ ID NO: 373 - RNA, 21 nt, Homo sapiens
  source 1..21: mol_type = unassigned RNA
  misc_difference 20: note = modified_base - a, c, t, g, unknown or other - adenine, cytosine, thymine, or guanine
  misc_difference 21: note = modified_base - a, c, t, g, unknown or other - adenine, cytosine, thymine, or guanine
ccatgagcatgcagaggtgnn

SEQ ID NO: 374 - RNA, 21 nt, Homo sapiens
  source 1..21: mol_type = unassigned RNA
  misc_difference 20: note = modified_base - a, c, t, g, unknown or other - adenine, cytosine, thymine, or guanine
  misc_difference 21: note = modified_base - a, c, t, g, unknown or other - adenine, cytosine, thymine, or guanine
cacctctgcatgctcatggnn

SEQ ID NO: 375 - RNA, 21 nt, Homo sapiens
  source 1..21: mol_type = unassigned RNA
  misc_difference 20: note = modified_base - a, c, t, g, unknown or other - adenine, cytosine, thymine, or guanine
  misc_difference 21: note = modified_base - a, c, t, g, unknown or other - adenine, cytosine, thymine, or guanine
agcatgcagaggtggtattnn

SEQ ID NO: 376 - RNA, 21 nt, Homo sapiens
  source 1..21: mol_type = unassigned RNA
  misc_difference 20: note = modified_base - a, c, t, g, unknown or other - adenine, cytosine, thymine, or guanine
  misc_difference 21: note = modified_base - a, c, t, g, unknown or other - adenine, cytosine, thymine, or guanine
aataccacctctgcatgctnn

SEQ ID NO: 377 - RNA, 21 nt, Homo sapiens
  source 1..21: mol_type = unassigned RNA
  misc_difference 20: note = modified_base - a, c, t, g, unknown or other - adenine, cytosine, thymine, or guanine
  misc_difference 21: note = modified_base - a, c, t, g, unknown or other - adenine, cytosine, thymine, or guanine
catgcagaggtggtattcann

SEQ ID NO: 378 - RNA, 21 nt, Homo sapiens
  source 1..21: mol_type = unassigned RNA
  misc_difference 20: note = modified_base - a, c, t, g, unknown or other - adenine, cytosine, thymine, or guanine
  misc_difference 21: note = modified_base - a, c, t, g, unknown or other - adenine, cytosine, thymine, or guanine
tgaataccacctctgcatgnn

SEQ ID NO: 379 - RNA, 21 nt, Homo sapiens
  source 1..21: mol_type = unassigned RNA
  misc_difference 20: note = modified_base - a, c, t, g, unknown or other - adenine, cytosine, thymine, or guanine
  misc_difference 21: note = modified_base - a, c, t, g, unknown or other - adenine, cytosine, thymine, or guanine
atgcagaggtggtattcacnn

SEQ ID NO: 380 - RNA, 21 nt, Homo sapiens
  source 1..21: mol_type = unassigned RNA
  misc_difference 20: note = modified_base - a, c, t, g, unknown or other - adenine, cytosine, thymine, or guanine
  misc_difference 21: note = modified_base - a, c, t, g, unknown or other - adenine, cytosine, thymine, or guanine
gtgaataccacctctgcatnn

SEQ ID NO: 381 - RNA, 21 nt, Homo sapiens
  source 1..21: mol_type = unassigned RNA
  misc_difference 20: note = modified_base - a, c, t, g, unknown or other - adenine, cytosine, thymine, or guanine
  misc_difference 21: note = modified_base - a, c, t, g, unknown or other - adenine, cytosine, thymine, or guanine
ggtggtattcacagccaacnn

SEQ ID NO: 382 - RNA, 21 nt, Homo sapiens
  source 1..21: mol_type = unassigned RNA
  misc_difference 20: note = modified_base - a, c, t, g, unknown or other - adenine, cytosine, thymine, or guanine
  misc_difference 21: note = modified_base - a, c, t, g, unknown or other - adenine, cytosine, thymine, or guanine
gttggctgtgaataccaccnn

SEQ ID NO: 383 - RNA, 21 nt, Homo sapiens
  source 1..21: mol_type = unassigned RNA
  misc_difference 20: note = modified_base - a, c, t, g, unknown or other - adenine, cytosine, thymine, or guanine
  misc_difference 21: note = modified_base - a, c, t, g, unknown or other - adenine, cytosine, thymine, or guanine
gtggtattcacagccaacgnn

SEQ ID NO: 384 - RNA, 21 nt, Homo sapiens
  source 1..21: mol_type = unassigned RNA
  misc_difference 20: note = modified_base - a, c, t, g, unknown or other - adenine, cytosine, thymine, or guanine
  misc_difference 21: note = modified_base - a, c, t, g, unknown or other - adenine, cytosine, thymine, or guanine
cgttggctgtgaataccacnn

SEQ ID NO: 385 - RNA, 21 nt, Homo sapiens
  source 1..21: mol_type = unassigned RNA
  misc_difference 20: note = modified_base - a, c, t, g, unknown or other - adenine, cytosine, thymine, or guanine
  misc_difference 21: note = modified_base - a, c, t, g, unknown or other - adenine, cytosine, thymine, or guanine
tggtattcacagccaacgann

SEQ ID NO: 386 - RNA, 21 nt, Homo sapiens
  source 1..21: mol_type = unassigned RNA
  misc_difference 20: note = modified_base - a, c, t, g, unknown or other - adenine, cytosine, thymine, or guanine
  misc_difference 21: note = modified_base - a, c, t, g, unknown or other - adenine, cytosine, thymine, or guanine
tcgttggctgtgaataccann

SEQ ID NO: 387 - RNA, 21 nt, Homo sapiens
  source 1..21: mol_type = unassigned RNA
  misc_difference 20: note = modified_base - a, c, t, g, unknown or other - adenine, cytosine, thymine, or guanine
  misc_difference 21: note = modified_base - a, c, t, g, unknown or other - adenine, cytosine, thymine, or guanine
ggtattcacagccaacgacnn

SEQ ID NO: 388 - RNA, 21 nt, Homo sapiens
  source 1..21: mol_type = unassigned RNA
  misc_difference 20: note = modified_base - a, c, t, g, unknown or other - adenine, cytosine, thymine, or guanine
  misc_difference 21: note = modified_base - a, c, t, g, unknown or other - adenine, cytosine, thymine, or guanine
gtcgttggctgtgaataccnn

SEQ ID NO: 389 - RNA, 21 nt, Homo sapiens
  source 1..21: mol_type = unassigned RNA
  misc_difference 20: note = modified_base - a, c, t, g, unknown or other - adenine, cytosine, thymine, or guanine
  misc_difference 21: note = modified_base - a, c, t, g, unknown or other - adenine, cytosine, thymine, or guanine
gtattcacagccaacgactnn

SEQ ID NO: 390 - RNA, 21 nt, Homo sapiens
  source 1..21: mol_type = unassigned RNA
  misc_difference 20: note = modified_base - a, c, t, g, unknown or other - adenine, cytosine, thymine, or guanine
  misc_difference 21: note = modified_base - a, c, t, g, unknown or other - adenine, cytosine, thymine, or guanine
agtcgttggctgtgaatacnn

SEQ ID NO: 391 - RNA, 21 nt, Homo sapiens
  source 1..21: mol_type = unassigned RNA
  misc_difference 20: note = modified_base - a, c, t, g, unknown or other - adenine, cytosine, thymine, or guanine
  misc_difference 21: note = modified_base - a, c, t, g, unknown or other - adenine, cytosine, thymine, or guanine
tattcacagccaacgactcnn

SEQ ID NO: 392 - RNA, 21 nt, Homo sapiens
  source 1..21: mol_type = unassigned RNA
  misc_difference 20: note = modified_base - a, c, t, g, unknown or other - adenine, cytosine, thymine, or guanine
  misc_difference 21: note = modified_base - a, c, t, g, unknown or other - adenine, cytosine, thymine, or guanine
gagtcgttggctgtgaatann

SEQ ID NO: 393 - RNA, 21 nt, Homo sapiens
  source 1..21: mol_type = unassigned RNA
  misc_difference 20: note = modified_base - a, c, t, g, unknown or other - adenine, cytosine, thymine, or guanine
  misc_difference 21: note = modified_base - a, c, t, g, unknown or other - adenine, cytosine, thymine, or guanine
tcacagccaacgactccggnn

SEQ ID NO: 394 - RNA, 21 nt, Homo sapiens
  source 1..21: mol_type = unassigned RNA
  misc_difference 20: note = modified_base - a, c, t, g, unknown or other - adenine, cytosine, thymine, or guanine
  misc_difference 21: note = modified_base - a, c, t, g, unknown or other - adenine, cytosine, thymine, or guanine
ccggagtcgttggctgtgann

SEQ ID NO: 395 - RNA, 21 nt, Homo sapiens
  source 1..21: mol_type = unassigned RNA
  misc_difference 20: note = modified_base - a, c, t, g, unknown or other - adenine, cytosine, thymine, or guanine
  misc_difference 21: note = modified_base - a, c, t, g, unknown or other - adenine, cytosine, thymine, or guanine
ccccgccgctacaccattgnn

SEQ ID NO: 396 - RNA, 21 nt, Homo sapiens
  source 1..21: mol_type = unassigned RNA
  misc_difference 20: note = modified_base - a, c, t, g, unknown or other - adenine, cytosine, thymine, or guanine
  misc_difference 21: note = modified_base - a, c, t, g, unknown or other - adenine, cytosine, thymine, or guanine
caatggtgtagcggcggggnn

SEQ ID NO: 397 - RNA, 21 nt, Homo sapiens
  source 1..21: mol_type = unassigned RNA
  misc_difference 20: note = modified_base - a, c, t, g, unknown or other - adenine, cytosine, thymine, or guanine
  misc_difference 21: note = modified_base - a, c, t, g, unknown or other - adenine, cytosine, thymine, or guanine
gaagtccactcattcttggnn

SEQ ID NO: 398 - RNA, 21 nt, Homo sapiens
  source 1..21: mol_type = unassigned RNA
  misc_difference 20: note = modified_base - a, c, t, g, unknown or other - adenine, cytosine, thymine, or guanine
  misc_difference 21: note = modified_base - a, c, t, g, unknown or other - adenine, cytosine, thymine, or guanine
ccaagaatgagtggacttcnn

SEQ ID NO: 399 - RNA, 21 nt, Homo sapiens
  source 1..21: mol_type = unassigned RNA
  misc_difference 20: note = modified_base - a, c, t, g, unknown or other - adenine, cytosine, thymine, or guanine
  misc_difference 21: note = modified_base - a, c, t, g, unknown or other - adenine, cytosine, thymine, or guanine
ccctgctgagcccctactcnn

SEQ ID NO: 400 - RNA, 21 nt, Homo sapiens
  source 1..21: mol_type = unassigned RNA
  misc_difference 20: note = modified_base - a, c, t, g, unknown or other - adenine, cytosine, thymine, or guanine
  misc_difference 21: note = modified_base - a, c, t, g, unknown or other - adenine, cytosine, thymine, or guanine
gagtaggggctcagcagggnn

SEQ ID NO: 401 - RNA, 21 nt, Homo sapiens
  source 1..21: mol_type = unassigned RNA
  misc_difference 20: note = modified_base - a, c, t, g, unknown or other - adenine, cytosine, thymine, or guanine
  misc_difference 21: note = modified_base - a, c, t, g, unknown or other - adenine, cytosine, thymine, or guanine
ctgagcccctactcctattnn

SEQ ID NO: 402 - RNA, 21 nt, Homo sapiens
  source 1..21: mol_type = unassigned RNA
  misc_difference 20: note = modified_base - a, c, t, g, unknown or other - adenine, cytosine, thymine, or guanine
  misc_difference 21: note = modified_base - a, c, t, g, unknown or other - adenine, cytosine, thymine, or guanine
aataggagtaggggctcagnn

SEQ ID NO: 403 - RNA, 21 nt, Homo sapiens
  source 1..21: mol_type = unassigned RNA
  misc_difference 20: note = modified_base - a, c, t, g, unknown or other - adenine, cytosine, thymine, or guanine
  misc_difference 21: note = modified_base - a, c, t, g, unknown or other - adenine, cytosine, thymine, or guanine
tgagcccctactcctattcnn

SEQ ID NO: 404 - RNA, 21 nt, Homo sapiens
  source 1..21: mol_type = unassigned RNA
  misc_difference 20: note = modified_base - a, c, t, g, unknown or other - adenine, cytosine, thymine, or guanine
  misc_difference 21: note = modified_base - a, c, t, g, unknown or other - adenine, cytosine, thymine, or guanine
gaataggagtaggggctcann

SEQ ID NO: 405 - RNA, 21 nt, Homo sapiens
  source 1..21: mol_type = unassigned RNA
  misc_difference 20: note = modified_base - a, c, t, g, unknown or other - adenine, cytosine, thymine, or guanine
  misc_difference 21: note = modified_base - a, c, t, g, unknown or other - adenine, cytosine, thymine, or guanine
cccctactcctattccaccnn

SEQ ID NO: 406 - RNA, 21 nt, Homo sapiens
  source 1..21: mol_type = unassigned RNA
  misc_difference 20: note = modified_base - a, c, t, g, unknown or other - adenine, cytosine, thymine, or guanine
  misc_difference 21: note = modified_base - a, c, t, g, unknown or other - adenine, cytosine, thymine, or guanine
ggtggaataggagtaggggnn

SEQ ID NO: 407 - RNA, 21 nt, Homo sapiens
  source 1..21: mol_type = unassigned RNA
  misc_difference 20: note = modified_base - a, c, t, g, unknown or other - adenine, cytosine, thymine, or guanine
  misc_difference 21: note = modified_base - a, c, t, g, unknown or other - adenine, cytosine, thymine, or guanine
ctactcctattccaccacgnn

SEQ ID NO: 408 - RNA, 21 nt, Homo sapiens
  source 1..21: mol_type = unassigned RNA
  misc_difference 20: note = modified_base - a, c, t, g, unknown or other - adenine, cytosine, thymine, or guanine
  misc_difference 21: note = modified_base - a, c, t, g, unknown or other - adenine, cytosine, thymine, or guanine
cgtggtggaataggagtagnn

SEQ ID NO: 409 - RNA, 21 nt, Homo sapiens
  source 1..21: mol_type = unassigned RNA
  misc_difference 20: note = modified_base - a, c, t, g, unknown or other - adenine, cytosine, thymine, or guanine
  misc_difference 21: note = modified_base - a, c, t, g, unknown or other - adenine, cytosine, thymine, or guanine
tactcctattccaccacggnn

SEQ ID NO: 410 - RNA, 21 nt, Homo sapiens
  source 1..21: mol_type = unassigned RNA
  misc_difference 20: note = modified_base - a, c, t, g, unknown or other - adenine, cytosine, thymine, or guanine
  misc_difference 21: note = modified_base - a, c, t, g, unknown or other - adenine, cytosine, thymine, or guanine
ccgtggtggaataggagtann

SEQ ID NO: 411 - RNA, 21 nt, Homo sapiens
  source 1..21: mol_type = unassigned RNA
  misc_difference 20: note = modified_base - a, c, t, g, unknown or other - adenine, cytosine, thymine, or guanine
  misc_difference 21: note = modified_base - a, c, t, g, unknown or other - adenine, cytosine, thymine, or guanine
actcctattccaccacggcnn

SEQ ID NO: 412 - RNA, 21 nt, Homo sapiens
  source 1..21: mol_type = unassigned RNA
  misc_difference 20: note = modified_base - a, c, t, g, unknown or other - adenine, cytosine, thymine, or guanine
  misc_difference 21: note = modified_base - a, c, t, g, unknown or other - adenine, cytosine, thymine, or guanine
gccgtggtggaataggagtnn

SEQ ID NO: 413 - RNA, 21 nt, Homo sapiens
  source 1..21: mol_type = unassigned RNA
  misc_difference 20: note = modified_base - a, c, t, g, unknown or other - adenine, cytosine, thymine, or guanine
  misc_difference 21: note = modified_base - a, c, t, g, unknown or other - adenine, cytosine, thymine, or guanine
tcctattccaccacggctgnn

SEQ ID NO: 414 - RNA, 21 nt, Homo sapiens
  source 1..21: mol_type = unassigned RNA
  misc_difference 20: note = modified_base - a, c, t, g, unknown or other - adenine, cytosine, thymine, or guanine
  misc_difference 21: note = modified_base - a, c, t, g, unknown or other - adenine, cytosine, thymine, or guanine
cagccgtggtggaataggann

SEQ ID NO: 415 - RNA, 21 nt, Homo sapiens
  source 1..21: mol_type = unassigned RNA
  misc_difference 20: note = modified_base - a, c, t, g, unknown or other - adenine, cytosine, thymine, or guanine
  misc_difference 21: note = modified_base - a, c, t, g, unknown or other - adenine, cytosine, thymine, or guanine
tattccaccacggctgtcgnn

SEQ ID NO: 416 - RNA, 21 nt, Homo sapiens
  source 1..21: mol_type = unassigned RNA
  misc_difference 20: note = modified_base - a, c, t, g, unknown or other - adenine, cytosine, thymine, or guanine
  misc_difference 21: note = modified_base - a, c, t, g, unknown or other - adenine, cytosine, thymine, or guanine
cgacagccgtggtggaatann

SEQ ID NO: 417 - RNA, 21 nt, Homo sapiens
  source 1..21: mol_type = unassigned RNA
  misc_difference 20: note = modified_base - a, c, t, g, unknown or other - adenine, cytosine, thymine, or guanine
  misc_difference 21: note = modified_base - a, c, t, g, unknown or other - adenine, cytosine, thymine, or guanine
attccaccacggctgtcgtnn

SEQ ID NO: 418 - RNA, 21 nt, Homo sapiens
  source 1..21: mol_type = unassigned RNA
  misc_difference 20: note = modified_base - a, c, t, g, unknown or other - adenine, cytosine, thymine, or guanine
  misc_difference 21: note = modified_base - a, c, t, g, unknown or other - adenine, cytosine, thymine, or guanine
acgacagccgtggtggaatnn

SEQ ID NO: 419 - RNA, 21 nt, Homo sapiens
  source 1..21: mol_type = unassigned RNA
  misc_difference 20: note = modified_base - a, c, t, g, unknown or other - adenine, cytosine, thymine, or guanine
  misc_difference 21: note = modified_base - a, c, t, g, unknown or other - adenine, cytosine, thymine, or guanine
caccacggctgtcgtcaccnn

SEQ ID NO: 420 - RNA, 21 nt, Homo sapiens
  source 1..21: mol_type = unassigned RNA
  misc_difference 20: note = modified_base - a, c, t, g, unknown or other - adenine, cytosine, thymine, or guanine
  misc_difference 21: note = modified_base - a, c, t, g, unknown or other - adenine, cytosine, thymine, or guanine
ggtgacgacagccgtggtgnn

SEQ ID NO: 421 - RNA, 21 nt, Homo sapiens
  source 1..21: mol_type = unassigned RNA
  misc_difference 20: note = modified_base - a, c, t, g, unknown or other - adenine, cytosine, thymine, or guanine
  misc_difference 21: note = modified_base - a, c, t, g, unknown or other - adenine, cytosine, thymine, or guanine
accacggctgtcgtcaccann

SEQ ID NO: 422 - RNA, 21 nt, Homo sapiens
  source 1..21: mol_type = unassigned RNA
  misc_difference 20: note = modified_base - a, c, t, g, unknown or other - adenine, cytosine, thymine, or guanine
  misc_difference 21: note = modified_base - a, c, t, g, unknown or other - adenine, cytosine, thymine, or guanine
tggtgacgacagccgtggtnn

SEQ ID NO: 423 - RNA, 21 nt, Homo sapiens
  source 1..21: mol_type = unassigned RNA
  misc_difference 20: note = modified_base - a, c, t, g, unknown or other - adenine, cytosine, thymine, or guanine
  misc_difference 21: note = modified_base - a, c, t, g, unknown or other - adenine, cytosine, thymine, or guanine
ccacggctgtcgtcaccaann

SEQ ID NO: 424 - RNA, 21 nt, Homo sapiens
  source 1..21: mol_type = unassigned RNA
  misc_difference 20: note = modified_base - a, c, t, g, unknown or other - adenine, cytosine, thymine, or guanine
  misc_difference 21: note = modified_base - a, c, t, g, unknown or other - adenine, cytosine, thymine, or guanine
ttggtgacgacagccgtggnn

SEQ ID NO: 425 - RNA, 21 nt, Homo sapiens
  source 1..21: mol_type = unassigned RNA
  misc_difference 20: note = modified_base - a, c, t, g, unknown or other - adenine, cytosine, thymine, or guanine
  misc_difference 21: note = modified_base - a, c, t, g, unknown or other - adenine, cytosine, thymine, or guanine
acggctgtcgtcaccaatcnn

SEQ ID NO: 426 - RNA, 21 nt, Homo sapiens
  source 1..21: mol_type = unassigned RNA
  misc_difference 20: note = modified_base - a, c, t, g, unknown or other - adenine, cytosine, thymine, or guanine
  misc_difference 21: note = modified_base - a, c, t, g, unknown or other - adenine, cytosine, thymine, or guanine
gattggtgacgacagccgtnn

SEQ ID NO: 427 - RNA, 21 nt, Homo sapiens
  source 1..21: mol_type = unassigned RNA
  misc_difference 20: note = modified_base - a, c, t, g, unknown or other - adenine, cytosine, thymine, or guanine
  misc_difference 21: note = modified_base - a, c, t, g, unknown or other - adenine, cytosine, thymine, or guanine
cggctgtcgtcaccaatccnn

SEQ ID NO: 428 - RNA, 21 nt, Homo sapiens
  source 1..21: mol_type = unassigned RNA
  misc_difference 20: note = modified_base - a, c, t, g, unknown or other - adenine, cytosine, thymine, or guanine
  misc_difference 21: note = modified_base - a, c, t, g, unknown or other - adenine, cytosine, thymine, or guanine
ggattggtgacgacagccgnn

SEQ ID NO: 429 - RNA, 21 nt, Homo sapiens
  source 1..21: mol_type = unassigned RNA
  misc_difference 20: note = modified_base - a, c, t, g, unknown or other - adenine, cytosine, thymine, or guanine
  misc_difference 21: note = modified_base - a, c, t, g, unknown or other - adenine, cytosine, thymine, or guanine
cgtcaccaatcccaaggaann

SEQ ID NO: 430 - RNA, 21 nt, Homo sapiens
  source 1..21: mol_type = unassigned RNA
  misc_difference 20: note = modified_base - a, c, t, g, unknown or other - adenine, cytosine, thymine, or guanine
  misc_difference 21: note = modified_base - a, c, t, g, unknown or other - adenine, cytosine, thymine, or guanine
ttccttgggattggtgacgnn

SEQ ID NO: 431 - RNA, 21 nt, Homo sapiens
  source 1..21: mol_type = unassigned RNA
  misc_difference 20: note = modified_base - a, c, t, g, unknown or other - adenine, cytosine, thymine, or guanine
  misc_difference 21: note = modified_base - a, c, t, g, unknown or other - adenine, cytosine, thymine, or guanine
caatcccaaggaatgagggnn

SEQ ID NO: 432 - RNA, 21 nt, Homo sapiens
  source 1..21: mol_type = unassigned RNA
  misc_difference 20: note = modified_base - a, c, t, g, unknown or other - adenine, cytosine, thymine, or guanine
  misc_difference 21: note = modified_base - a, c, t, g, unknown or other - adenine, cytosine, thymine, or guanine
ccctcattccttgggattgnn

SEQ ID NO: 433 - RNA, 21 nt, Homo sapiens
  source 1..21: mol_type = unassigned RNA
  misc_difference 20: note = modified_base - a, c, t, g, unknown or other - adenine, cytosine, thymine, or guanine
  misc_difference 21: note = modified_base - a, c, t, g, unknown or other - adenine, cytosine, thymine, or guanine
cctgaaggacgagggatggnn

SEQ ID NO: 434 - RNA, 21 nt, Homo sapiens
  source 1..21: mol_type = unassigned RNA
  misc_difference 20: note = modified_base - a, c, t, g, unknown or other - adenine, cytosine, thymine, or guanine
  misc_difference 21: note = modified_base - a, c, t, g, unknown or other - adenine, cytosine, thymine, or guanine
ccatccctcgtccttcaggnn

SEQ ID NO: 435 - RNA, 21 nt, Homo sapiens
  source 1..21: mol_type = unassigned RNA
  misc_difference 20: note = modified_base - a, c, t, g, unknown or other - adenine, cytosine, thymine, or guanine
  misc_difference 21: note = modified_base - a, c, t, g, unknown or other - adenine, cytosine, thymine, or guanine
ggacgagggatgggatttcnn

SEQ ID NO: 436 - RNA, 21 nt, Homo sapiens
  source 1..21: mol_type = unassigned RNA
  misc_difference 20: note = modified_base - a, c, t, g, unknown or other - adenine, cytosine, thymine, or guanine
  misc_difference 21: note = modified_base - a, c, t, g, unknown or other - adenine, cytosine, thymine, or guanine
gaaatcccatccctcgtccnn

SEQ ID NO: 437 - RNA, 21 nt, Homo sapiens
  source 1..21: mol_type = unassigned RNA
  misc_difference 20: note = modified_base - a, c, t, g, unknown or other - adenine, cytosine, thymine, or guanine
  misc_difference 21: note = modified_base - a, c, t, g, unknown or other - adenine, cytosine, thymine, or guanine
aagtccactcattcttggcnn

SEQ ID NO: 438 - RNA, 21 nt, Homo sapiens
  source 1..21: mol_type = unassigned RNA
  misc_difference 20: note = modified_base - a, c, t, g, unknown or other - adenine, cytosine, thymine, or guanine
  misc_difference 21: note = modified_base - a, c, t, g, unknown or other - adenine, cytosine, thymine, or guanine
gccaagaatgagtggacttnn

SEQ ID NO: 439 - RNA, 21 nt, Homo sapiens
  source 1..21: mol_type = unassigned RNA
  misc_difference 20: note = modified_base - a, c, t, g, unknown or other - adenine, cytosine, thymine, or guanine
  misc_difference 21: note = modified_base - a, c, t, g, unknown or other - adenine, cytosine, thymine, or guanine
gggatttcatgtaaccaagnn

SEQ ID NO: 440 - RNA, 21 nt, Homo sapiens
  source 1..21: mol_type = unassigned RNA
  misc_difference 20: note = modified_base - a, c, t, g, unknown or other - adenine, cytosine, thymine, or guanine
  misc_difference 21: note = modified_base - a, c, t, g, unknown or other - adenine, cytosine, thymine, or guanine
cttggttacatgaaatcccnn

SEQ ID NO: 441 - RNA, 21 nt, Homo sapiens
  source 1..21: mol_type = unassigned RNA
  misc_difference 20: note = modified_base - a, c, t, g, unknown or other - adenine, cytosine, thymine, or guanine
  misc_difference 21: note = modified_base - a, c, t, g, unknown or other - adenine, cytosine, thymine, or guanine
ggatttcatgtaaccaagann

SEQ ID NO: 442 - RNA, 21 nt, Homo sapiens
  source 1..21: mol_type = unassigned RNA
  misc_difference 20: note = modified_base - a, c, t, g, unknown or other - adenine, cytosine, thymine, or guanine
  misc_difference 21: note = modified_base - a, c, t, g, unknown or other - adenine, cytosine, thymine, or guanine
tcttggttacatgaaatccnn

SEQ ID NO: 443 - RNA, 21 nt, Homo sapiens
  source 1..21: mol_type = unassigned RNA
  misc_difference 20: note = modified_base - a, c, t, g, unknown or other - adenine, cytosine, thymine, or guanine
  misc_difference 21: note = modified_base - a, c, t, g, unknown or other - adenine, cytosine, thymine, or guanine
tcatgtaaccaagagtattnn

SEQ ID NO: 444 - RNA, 21 nt, Homo sapiens
  source 1..21: mol_type = unassigned RNA
  misc_difference 20: note = modified_base - a, c, t, g, unknown or other - adenine, cytosine, thymine, or guanine
  misc_difference 21: note = modified_base - a, c, t, g, unknown or other - adenine, cytosine, thymine, or guanine
aatactcttggttacatgann

SEQ ID NO: 445 - RNA, 21 nt, Homo sapiens
  source 1..21: mol_type = unassigned RNA
  misc_difference 20: note = modified_base - a, c, t, g, unknown or other - adenine, cytosine, thymine, or guanine
  misc_difference 21: note = modified_base - a, c, t, g, unknown or other - adenine, cytosine, thymine, or guanine
atgtaaccaagagtattccnn

SEQ ID NO: 446 - RNA, 21 nt, Homo sapiens
  source 1..21: mol_type = unassigned RNA
  misc_difference 20: note = modified_base - a, c, t, g, unknown or other - adenine, cytosine, thymine, or guanine
  misc_difference 21: note = modified_base - a, c, t, g, unknown or other - adenine, cytosine, thymine, or guanine
ggaatactcttggttacatnn

SEQ ID NO: 447 - RNA, 21 nt, Homo sapiens
  source 1..21: mol_type = unassigned RNA
  misc_difference 20: note = modified_base - a, c, t, g, unknown or other - adenine, cytosine, thymine, or guanine
  misc_difference 21: note = modified_base - a, c, t, g, unknown or other - adenine, cytosine, thymine, or guanine
tgtaaccaagagtattccann

SEQ ID NO: 448 - RNA, 21 nt, Homo sapiens
  source 1..21: mol_type = unassigned RNA
  misc_difference 20: note = modified_base - a, c, t, g, unknown or other - adenine, cytosine, thymine, or guanine
  misc_difference 21: note = modified_base - a, c, t, g, unknown or other - adenine, cytosine, thymine, or guanine
tggaatactcttggttacann

SEQ ID NO: 449 - RNA, 21 nt, Homo sapiens
  source 1..21: mol_type = unassigned RNA
  misc_difference 20: note = modified_base - a, c, t, g, unknown or other - adenine, cytosine, thymine, or guanine
  misc_difference 21: note = modified_base - a, c, t, g, unknown or other - adenine, cytosine, thymine, or guanine
gtaaccaagagtattccatnn

SEQ ID NO: 450 - RNA, 21 nt, Homo sapiens
  source 1..21: mol_type = unassigned RNA
  misc_difference 20: note = modified_base - a, c, t, g, unknown or other - adenine, cytosine, thymine, or guanine
  misc_difference 21: note = modified_base - a, c, t, g, unknown or other - adenine, cytosine, thymine, or guanine
atggaatactcttggttacnn

SEQ ID NO: 451 - RNA, 21 nt, Homo sapiens
  source 1..21: mol_type = unassigned RNA
  misc_difference 20: note = modified_base - a, c, t, g, unknown or other - adenine, cytosine, thymine, or guanine
  misc_difference 21: note = modified_base - a, c, t, g, unknown or other - adenine, cytosine, thymine, or guanine
tgccttgctggactggtatnn

SEQ ID NO: 452 - RNA, 21 nt, Homo sapiens
  source 1..21: mol_type = unassigned RNA
  misc_difference 20: note = modified_base - a, c, t, g, unknown or other - adenine, cytosine, thymine, or guanine
  misc_difference 21: note = modified_base - a, c, t, g, unknown or other - adenine, cytosine, thymine, or guanine
ataccagtccagcaaggcann

SEQ ID NO: 453 - RNA, 21 nt, Homo sapiens
  source 1..21: mol_type = unassigned RNA
  misc_difference 20: note = modified_base - a, c, t, g, unknown or other - adenine, cytosine, thymine, or guanine
  misc_difference 21: note = modified_base - a, c, t, g, unknown or other - adenine, cytosine, thymine, or guanine
taaagcagtgttttcacctnn

SEQ ID NO: 454 - RNA, 21 nt, Homo sapiens
  source 1..21: mol_type = unassigned RNA
  misc_difference 20: note = modified_base - a, c, t, g, unknown or other - adenine, cytosine, thymine, or guanine
  misc_difference 21: note = modified_base - a, c, t, g, unknown or other - adenine, cytosine, thymine, or guanine
aggtgaaaacactgctttann

SEQ ID NO: 455 - RNA, 21 nt, Homo sapiens
  source 1..21: mol_type = unassigned RNA
  misc_difference 20: note = modified_base - a, c, t, g, unknown or other - adenine, cytosine, thymine, or guanine
  misc_difference 21: note = modified_base - a, c, t, g, unknown or other - adenine, cytosine, thymine, or guanine
gccttgctggactggtattnn

SEQ ID NO: 456 - RNA, 21 nt, Homo sapiens
  source 1..21: mol_type = unassigned RNA
  misc_difference 20: note = modified_base - a, c, t, g, unknown or other - adenine, cytosine, thymine, or guanine
  misc_difference 21: note = modified_base - a, c, t, g, unknown or other - adenine, cytosine, thymine, or guanine
aataccagtccagcaaggcnn

SEQ ID NO: 457 - RNA, 21 nt, Homo sapiens
  source 1..21: mol_type = unassigned RNA
  misc_difference 20: note = modified_base - a, c, t, g, unknown or other - adenine, cytosine, thymine, or guanine
  misc_difference 21: note = modified_base - a, c, t, g, unknown or other - adenine, cytosine, thymine, or guanine
tgttttcacctcatatgctnn

SEQ ID NO: 458 - RNA, 21 nt, Homo sapiens
  source 1..21: mol_type = unassigned RNA
  misc_difference 20: note = modified_base - a, c, t, g, unknown or other - adenine, cytosine, thymine, or guanine
  misc_difference 21: note = modified_base - a, c, t, g, unknown or other - adenine, cytosine, thymine, or guanine
agcatatgaggtgaaaacann

SEQ ID NO: 459 - RNA, 21 nt, Homo sapiens
  source 1..21: mol_type = unassigned RNA
  misc_difference 20: note = modified_base - a, c, t, g, unknown or other - adenine, cytosine, thymine, or guanine
  misc_difference 21: note = modified_base - a, c, t, g, unknown or other - adenine, cytosine, thymine, or guanine
gttttcacctcatatgctann

SEQ ID NO: 460 - RNA, 21 nt, Homo sapiens
  source 1..21: mol_type = unassigned RNA
  misc_difference 20: note = modified_base - a, c, t, g, unknown or other - adenine, cytosine, thymine, or guanine
  misc_difference 21: note = modified_base - a, c, t, g, unknown or other - adenine, cytosine, thymine, or guanine
tagcatatgaggtgaaaacnn

SEQ ID NO: 461 - RNA, 21 nt, Homo sapiens
  source 1..21: mol_type = unassigned RNA
  misc_difference 20: note = modified_base - a, c, t, g, unknown or other - adenine, cytosine, thymine, or guanine
  misc_difference 21: note = modified_base - a, c, t, g, unknown or other - adenine, cytosine, thymine, or guanine
ttttcacctcatatgctatnn

SEQ ID NO: 462 - RNA, 21 nt, Homo sapiens
  source 1..21: mol_type = unassigned RNA
  misc_difference 20: note = modified_base - a, c, t, g, unknown or other - adenine, cytosine, thymine, or guanine
  misc_difference 21: note = modified_base - a, c, t, g, unknown or other - adenine, cytosine, thymine, or guanine
atagcatatgaggtgaaaann

SEQ ID NO: 463 - RNA, 21 nt, Homo sapiens
  source 1..21: mol_type = unassigned RNA
  misc_difference 20: note = modified_base - a, c, t, g, unknown or other - adenine, cytosine, thymine, or guanine
  misc_difference 21: note = modified_base - a, c, t, g, unknown or other - adenine, cytosine, thymine, or guanine
ttcacctcatatgctatgtnn

SEQ ID NO: 464 - RNA, 21 nt, Homo sapiens
  source 1..21: mol_type = unassigned RNA
  misc_difference 20: note = modified_base - a, c, t, g, unknown or other - adenine, cytosine, thymine, or guanine
  misc_difference 21: note = modified_base - a, c, t, g, unknown or other - adenine, cytosine, thymine, or guanine
acatagcatatgaggtgaann

SEQ ID NO: 465 - RNA, 21 nt, Homo sapiens
  source 1..21: mol_type = unassigned RNA
  misc_difference 20: note = modified_base - a, c, t, g, unknown or other - adenine, cytosine, thymine, or guanine
  misc_difference 21: note = modified_base - a, c, t, g, unknown or other - adenine, cytosine, thymine, or guanine
cacctcatatgctatgttann

SEQ ID NO: 466 - RNA, 21 nt, Homo sapiens
  source 1..21: mol_type = unassigned RNA
  misc_difference 20: note = modified_base - a, c, t, g, unknown or other - adenine, cytosine, thymine, or guanine
  misc_difference 21: note = modified_base - a, c, t, g, unknown or other - adenine, cytosine, thymine, or guanine
taacatagcatatgaggtgnn

SEQ ID NO: 467 - RNA, 21 nt, Homo sapiens
  source 1..21: mol_type = unassigned RNA
  misc_difference 20: note = modified_base - a, c, t, g, unknown or other - adenine, cytosine, thymine, or guanine
  misc_difference 21: note = modified_base - a, c, t, g, unknown or other - adenine, cytosine, thymine, or guanine
ccttgctggactggtatttnn

SEQ ID NO: 468 - RNA, 21 nt, Homo sapiens
  source 1..21: mol_type = unassigned RNA
  misc_difference 20: note = modified_base - a, c, t, g, unknown or other - adenine, cytosine, thymine, or guanine
  misc_difference 21: note = modified_base - a, c, t, g, unknown or other - adenine, cytosine, thymine, or guanine
aaataccagtccagcaaggnn

SEQ ID NO: 469 - RNA, 21 nt, Homo sapiens
  source 1..21: mol_type = unassigned RNA
  misc_difference 20: note = modified_base - a, c, t, g, unknown or other - adenine, cytosine, thymine, or guanine
  misc_difference 21: note = modified_base - a, c, t, g, unknown or other - adenine, cytosine, thymine, or guanine
atatgctatgttagaagtcnn

SEQ ID NO: 470 - RNA, 21 nt, Homo sapiens
  source 1..21: mol_type = unassigned RNA
  misc_difference 20: note = modified_base - a, c, t, g, unknown or other - adenine, cytosine, thymine, or guanine
  misc_difference 21: note = modified_base - a, c, t, g, unknown or other - adenine, cytosine, thymine, or guanine
gacttctaacatagcatatnn

SEQ ID NO: 471 - RNA, 21 nt, Homo sapiens
  source 1..21: mol_type = unassigned RNA
  misc_difference 20: note = modified_base - a, c, t, g, unknown or other - adenine, cytosine, thymine, or guanine
  misc_difference 21: note = modified_base - a, c, t, g, unknown or other - adenine, cytosine, thymine, or guanine
tatgctatgttagaagtccnn

SEQ ID NO: 472 - RNA, 21 nt, Homo sapiens
  source 1..21: mol_type = unassigned RNA
  misc_difference 20: note = modified_base - a, c, t, g, unknown or other - adenine, cytosine, thymine, or guanine
  misc_difference 21: note = modified_base - a, c, t, g, unknown or other - adenine, cytosine, thymine, or guanine
ggacttctaacatagcatann

SEQ ID NO: 473 - RNA, 21 nt, Homo sapiens
  source 1..21: mol_type = unassigned RNA
  misc_difference 20: note = modified_base - a, c, t, g, unknown or other - adenine, cytosine, thymine, or guanine
  misc_difference 21: note = modified_base - a, c, t, g, unknown or other - adenine, cytosine, thymine, or guanine
tgctatgttagaagtccagnn

SEQ ID NO: 474 - RNA, 21 nt, Homo sapiens
  source 1..21: mol_type = unassigned RNA
  misc_difference 20: note = modified_base - a, c, t, g, unknown or other - adenine, cytosine, thymine, or guanine
  misc_difference 21: note = modified_base - a, c, t, g, unknown or other - adenine, cytosine, thymine, or guanine
ctggacttctaacatagcann

SEQ ID NO: 475 - RNA, 21 nt, Homo sapiens
  source 1..21: mol_type = unassigned RNA
  misc_difference 20: note = modified_base - a, c, t, g, unknown or other - adenine, cytosine, thymine, or guanine
  misc_difference 21: note = modified_base - a, c, t, g, unknown or other - adenine, cytosine, thymine, or guanine
cttgctggactggtatttgnn

SEQ ID NO: 476 - RNA, 21 nt, Homo sapiens
  source 1..21: mol_type = unassigned RNA
  misc_difference 20: note = modified_base - a, c, t, g, unknown or other - adenine, cytosine, thymine, or guanine
  misc_difference 21: note = modified_base - a, c, t, g, unknown or other - adenine, cytosine, thymine, or guanine
caaataccagtccagcaagnn

SEQ ID NO: 477 - RNA, 21 nt, Homo sapiens
  source 1..21: mol_type = unassigned RNA
  misc_difference 20: note = modified_base - a, c, t, g, unknown or other - adenine, cytosine, thymine, or guanine
  misc_difference 21: note = modified_base - a, c, t, g, unknown or other - adenine, cytosine, thymine, or guanine
agtccaggcagagacaatann

SEQ ID NO: 478 - RNA, 22 nt, Homo sapiens
  source 1..22: mol_type = unassigned RNA
  modified_base 19: mod_base = OTHER; note = Thymine
  modified_base 20: mod_base = OTHER; note = Thymine
  misc_difference 21: note = modified_base - a, c, t, g, unknown or other - adenine, cytosine, thymine, or guanine
  misc_difference 22: note = modified_base - a, c, t, g, unknown or other - adenine, cytosine, thymine, or guanine
attgtctctgcctggactttnn

SEQ ID NO: 479 - RNA, 21 nt, Homo sapiens
  source 1..21: mol_type = unassigned RNA
  misc_difference 20: note = modified_base - a, c, t, g, unknown or other - adenine, cytosine, thymine, or guanine
  misc_difference 21: note = modified_base - a, c, t, g, unknown or other - adenine, cytosine, thymine, or guanine
tccaggcagagacaataaann

SEQ ID NO: 480 - RNA, 21 nt, Homo sapiens
  source 1..21: mol_type = unassigned RNA
  misc_difference 20: note = modified_base - a, c, t, g, unknown or other - adenine, cytosine, thymine, or guanine
  misc_difference 21: note = modified_base - a, c, t, g, unknown or other - adenine, cytosine, thymine, or guanine
tttattgtctctgcctggann

SEQ ID NO: 481 - RNA, 21 nt, Homo sapiens
  source 1..21: mol_type = unassigned RNA
  misc_difference 20: note = modified_base - a, c, t, g, unknown or other - adenine, cytosine, thymine, or guanine
  misc_difference 21: note = modified_base - a, c, t, g, unknown or other - adenine, cytosine, thymine, or guanine
gtgaaaggcacttttcattnn

SEQ ID NO: 482 - RNA, 21 nt, Homo sapiens
  source 1..21: mol_type = unassigned RNA
  misc_difference 20: note = modified_base - a, c, t, g, unknown or other - adenine, cytosine, thymine, or guanine
  misc_difference 21: note = modified_base - a, c, t, g, unknown or other - adenine, cytosine, thymine, or guanine
aatgaaaagtgcctttcacnn

SEQ ID NO: 483 - RNA, 21 nt, Homo sapiens
  source 1..21: mol_type = unassigned RNA
  misc_difference 20: note = modified_base - a, c, t, g, unknown or other - adenine, cytosine, thymine, or guanine
  misc_difference 21: note = modified_base - a, c, t, g, unknown or other - adenine, cytosine, thymine, or guanine
tggactggtatttgtgtctnn

SEQ ID NO: 484 - RNA, 21 nt, Homo sapiens
  source 1..21: mol_type = unassigned RNA
  misc_difference 20: note = modified_base - a, c, t, g, unknown or other - adenine, cytosine, thymine, or guanine
  misc_difference 21: note = modified_base - a, c, t, g, unknown or other - adenine, cytosine, thymine, or guanine
agacacaaataccagtccann

SEQ ID NO: 485 - RNA, 21 nt, Homo sapiens
  source 1..21: mol_type = unassigned RNA
  misc_difference 20: note = modified_base - a, c, t, g, unknown or other - adenine, cytosine, thymine, or guanine
  misc_difference 21: note = modified_base - a, c, t, g, unknown or other - adenine, cytosine, thymine, or guanine
gtctgaggctggccctacgnn

SEQ ID NO: 486 - RNA, 21 nt, Homo sapiens
  source 1..21: mol_type = unassigned RNA
  misc_difference 20: note = modified_base - a, c, t, g, unknown or other - adenine, cytosine, thymine, or guanine
  misc_difference 21: note = modified_base - a, c, t, g, unknown or other - adenine, cytosine, thymine, or guanine
cgtagggccagcctcagacnn

SEQ ID NO: 487 - RNA, 21 nt, Homo sapiens
  source 1..21: mol_type = unassigned RNA
  misc_difference 20: note = modified_base - a, c, t, g, unknown or other - adenine, cytosine, thymine, or guanine
  misc_difference 21: note = modified_base - a, c, t, g, unknown or other - adenine, cytosine, thymine, or guanine
ctgaggctggccctacgggnn

SEQ ID NO: 488 - RNA, 21 nt, Homo sapiens
  source 1..21: mol_type = unassigned RNA
  misc_difference 20: note = modified_base - a, c, t, g, unknown or other - adenine, cytosine, thymine, or guanine
  misc_difference 21: note = modified_base - a, c, t, g, unknown or other - adenine, cytosine, thymine, or guanine
cccgtagggccagcctcagnn

SEQ ID NO: 489 - RNA, 21 nt, Homo sapiens
  source 1..21: mol_type = unassigned RNA
  misc_difference 20: note = modified_base - a, c, t, g, unknown or other - adenine, cytosine, thymine, or guanine
  misc_difference 21: note = modified_base - a, c, t, g, unknown or other - adenine, cytosine, thymine, or guanine
gaggctggccctacgggcann

SEQ ID NO: 490 - RNA, 21 nt, Homo sapiens
  source 1..21: mol_type = unassigned RNA
  misc_difference 20: note = modified_base - a, c, t, g, unknown or other - adenine, cytosine, thymine, or guanine
  misc_difference 21: note = modified_base - a, c, t, g, unknown or other - adenine, cytosine, thymine, or guanine
tgcccgtagggccagcctcnn

SEQ ID NO: 491 - RNA, 21 nt, Homo sapiens
  source 1..21: mol_type = unassigned RNA
  misc_difference 20: note = modified_base - a, c, t, g, unknown or other - adenine, cytosine, thymine, or guanine
  misc_difference 21: note = modified_base - a, c, t, g, unknown or other - adenine, cytosine, thymine, or guanine
aggctggccctacgggcacnn

SEQ ID NO: 492 - RNA, 21 nt, Homo sapiens
  source 1..21: mol_type = unassigned RNA
  misc_difference 20: note = modified_base - a, c, t, g, unknown or other - adenine, cytosine, thymine, or guanine
  misc_difference 21: note = modified_base - a, c, t, g, unknown or other - adenine, cytosine, thymine, or guanine
gtgcccgtagggccagcctnn

SEQ ID NO: 493 - RNA, 21 nt, Homo sapiens
  source 1..21: mol_type = unassigned RNA
  misc_difference 20: note = modified_base - a, c, t, g, unknown or other - adenine, cytosine, thymine, or guanine
  misc_difference 21: note = modified_base - a, c, t, g, unknown or other - adenine, cytosine, thymine, or guanine
gctggccctacgggcaccgnn

SEQ ID NO: 494 - RNA, 21 nt, Homo sapiens
  source 1..21: mol_type = unassigned RNA
  misc_difference 20: note = modified_base - a, c, t, g, unknown or other - adenine, cytosine, thymine, or guanine
  misc_difference 21: note = modified_base - a, c, t, g, unknown or other - adenine, cytosine, thymine, or guanine
cggtgcccgtagggccagcnn

SEQ ID NO: 495 - RNA, 21 nt, Homo sapiens
  source 1..21: mol_type = unassigned RNA
  misc_difference 20: note = modified_base - a, c, t, g, unknown or other - adenine, cytosine, thymine, or guanine
  misc_difference 21: note = modified_base - a, c, t, g, unknown or other - adenine, cytosine, thymine, or guanine
ctggccctacgggcaccggnn

SEQ ID NO: 496 - RNA, 21 nt, Homo sapiens
  source 1..21: mol_type = unassigned RNA
  misc_difference 20: note = modified_base - a, c, t, g, unknown or other - adenine, cytosine, thymine, or guanine
  misc_difference 21: note = modified_base - a, c, t, g, unknown or other - adenine, cytosine, thymine, or guanine
ccggtgcccgtagggccagnn

SEQ ID NO: 497 - RNA, 21 nt, Homo sapiens
  source 1..21: mol_type = unassigned RNA
  misc_difference 20: note = modified_base - a, c, t, g, unknown or other - adenine, cytosine, thymine, or guanine
  misc_difference 21: note = modified_base - a, c, t, g, unknown or other - adenine, cytosine, thymine, or guanine
ggccctacgggcaccggtgnn

SEQ ID NO: 498 - RNA, 21 nt, Homo sapiens
  source 1..21: mol_type = unassigned RNA
  misc_difference 20: note = modified_base - a, c, t, g, unknown or other - adenine, cytosine, thymine, or guanine
  misc_difference 21: note = modified_base - a, c, t, g, unknown or other - adenine, cytosine, thymine, or guanine
caccggtgcccgtagggccnn

SEQ ID NO: 499 - RNA, 21 nt, Homo sapiens
  source 1..21: mol_type = unassigned RNA
  misc_difference 20: note = modified_base - a, c, t, g, unknown or other - adenine, cytosine, thymine, or guanine
  misc_difference 21: note = modified_base - a, c, t, g, unknown or other - adenine, cytosine, thymine, or guanine
ccactcattcttggcaggann

SEQ ID NO: 500 - RNA, 21 nt, Homo sapiens
  source 1..21: mol_type = unassigned RNA
  misc_difference 20: note = modified_base - a, c, t, g, unknown or other - adenine, cytosine, thymine, or guanine
  misc_difference 21: note = modified_base - a, c, t, g, unknown or other - adenine, cytosine, thymine, or guanine
tcctgccaagaatgagtggnn

SEQ ID NO: 501 - RNA, 21 nt, Homo sapiens
  source 1..21: mol_type = unassigned RNA
  misc_difference 20: note = modified_base - a, c, t, g, unknown or other - adenine, cytosine, thymine, or guanine
  misc_difference 21: note = modified_base - a, c, t, g, unknown or other - adenine, cytosine, thymine, or guanine
cctacgggcaccggtgaatnn

SEQ ID NO: 502 - RNA, 21 nt, Homo sapiens
  source 1..21: mol_type = unassigned RNA
  misc_difference 20: note = modified_base - a, c, t, g, unknown or other - adenine, cytosine, thymine, or guanine
  misc_difference 21: note = modified_base - a, c, t, g, unknown or other - adenine, cytosine, thymine, or guanine
attcaccggtgcccgtaggnn

SEQ ID NO: 503 - RNA, 21 nt, Homo sapiens
  source 1..21: mol_type = unassigned RNA
  misc_difference 20: note = modified_base - a, c, t, g, unknown or other - adenine, cytosine, thymine, or guanine
  misc_difference 21: note = modified_base - a, c, t, g, unknown or other - adenine, cytosine, thymine, or guanine
ctacgggcaccggtgaatcnn

SEQ ID NO: 504 - RNA, 21 nt, Homo sapiens
  source 1..21: mol_type = unassigned RNA
  misc_difference 20: note = modified_base - a, c, t, g, unknown or other - adenine, cytosine, thymine, or guanine
  misc_difference 21: note = modified_base - a, c, t, g, unknown or other - adenine, cytosine, thymine, or guanine
gattcaccggtgcccgtagnn

SEQ ID NO: 505 - RNA, 21 nt, Homo sapiens
  source 1..21: mol_type = unassigned RNA
  misc_difference 20: note = modified_base - a, c, t, g, unknown or other - adenine, cytosine, thymine, or guanine
  misc_difference 21: note = modified_base - a, c, t, g, unknown or other - adenine, cytosine, thymine, or guanine
tacgggcaccggtgaatccnn

SEQ ID NO: 506 - RNA, 21 nt, Homo sapiens
  source 1..21: mol_type = unassigned RNA
  misc_difference 20: note = modified_base - a, c, t, g, unknown or other - adenine, cytosine, thymine, or guanine
  misc_difference 21: note = modified_base - a, c, t, g, unknown or other - adenine, cytosine, thymine, or guanine
ggattcaccggtgcccgtann

SEQ ID NO: 507 - RNA, 21 nt, Homo sapiens
  source 1..21: mol_type = unassigned RNA
  misc_difference 20: note = modified_base - a, c, t, g, unknown or other - adenine, cytosine, thymine, or guanine
  misc_difference 21: note = modified_base - a, c, t, g, unknown or other - adenine, cytosine, thymine, or guanine
acgggcaccggtgaatccann

SEQ ID NO: 508 - RNA, 21 nt, Homo sapiens
  source 1..21: mol_type = unassigned RNA
  misc_difference 20: note = modified_base - a, c, t, g, unknown or other - adenine, cytosine, thymine, or guanine
  misc_difference 21: note = modified_base - a, c, t, g, unknown or other - adenine, cytosine, thymine, or guanine
tggattcaccggtgcccgtnn

SEQ ID NO: 509 - RNA, 21 nt, Homo sapiens
  source 1..21: mol_type = unassigned RNA
  misc_difference 20: note = modified_base - a, c, t, g, unknown or other - adenine, cytosine, thymine, or guanine
  misc_difference 21: note = modified_base - a, c, t, g, unknown or other - adenine, cytosine, thymine, or guanine
gcaccggtgaatccaagtgnn

SEQ ID NO: 510 - RNA, 21 nt, Homo sapiens
  source 1..21: mol_type = unassigned RNA
  misc_difference 20: note = modified_base - a, c, t, g, unknown or other - adenine, cytosine, thymine, or guanine
  misc_difference 21: note = modified_base - a, c, t, g, unknown or other - adenine, cytosine, thymine, or guanine
cacttggattcaccggtgcnn

SEQ ID NO: 511 - RNA, 21 nt, Homo sapiens
  source 1..21: mol_type = unassigned RNA
  misc_difference 20: note = modified_base - a, c, t, g, unknown or other - adenine, cytosine, thymine, or guanine
  misc_difference 21: note = modified_base - a, c, t, g, unknown or other - adenine, cytosine, thymine, or guanine
caccggtgaatccaagtgtnn

SEQ ID NO: 512 - RNA, 21 nt, Homo sapiens
  source 1..21: mol_type = unassigned RNA
  misc_difference 20: note = modified_base - a, c, t, g, unknown or other - adenine, cytosine, thymine, or guanine
  misc_difference 21: note = modified_base - a, c, t, g, unknown or other - adenine, cytosine, thymine, or guanine
acacttggattcaccggtgnn

SEQ ID NO: 513 - RNA, 21 nt, Homo sapiens
  source 1..21: mol_type = unassigned RNA
  misc_difference 20: note = modified_base - a, c, t, g, unknown or other - adenine, cytosine, thymine, or guanine
  misc_difference 21: note = modified_base - a, c, t, g, unknown or other - adenine, cytosine, thymine, or guanine
tgtggccatgcatgtgttcnn

SEQ ID NO: 514 - RNA, 21 nt, Homo sapiens
  source 1..21: mol_type = unassigned RNA
  misc_difference 20: note = modified_base - a, c, t, g, unknown or other - adenine, cytosine, thymine, or guanine
  misc_difference 21: note = modified_base - a, c, t, g, unknown or other - adenine, cytosine, thymine, or guanine
gaacacatgcatggccacann

SEQ ID NO: 515 - RNA, 21 nt, Homo sapiens
  source 1..21: mol_type = unassigned RNA
  misc_difference 20: note = modified_base - a, c, t, g, unknown or other - adenine, cytosine, thymine, or guanine
  misc_difference 21: note = modified_base - a, c, t, g, unknown or other - adenine, cytosine, thymine, or guanine
gtggccatgcatgtgttcann

SEQ ID NO: 516 - RNA, 21 nt, Homo sapiens
  source 1..21: mol_type = unassigned RNA
  misc_difference 20: note = modified_base - a, c, t, g, unknown or other - adenine, cytosine, thymine, or guanine
  misc_difference 21: note = modified_base - a, c, t, g, unknown or other - adenine, cytosine, thymine, or guanine
tgaacacatgcatggccacnn

SEQ ID NO: 517 - RNA, 21 nt, Homo sapiens
  source 1..21: mol_type = unassigned RNA
  misc_difference 20: note = modified_base - a, c, t, g, unknown or other - adenine, cytosine, thymine, or guanine
  misc_difference 21: note = modified_base - a, c, t, g, unknown or other - adenine, cytosine, thymine, or guanine
gccatgcatgtgttcagaann

SEQ ID NO: 518 - RNA, 21 nt, Homo sapiens
  source 1..21: mol_type = unassigned RNA
  misc_difference 20: note = modified_base - a, c, t, g, unknown or other - adenine, cytosine, thymine, or guanine
  misc_difference 21: note = modified_base - a, c, t, g, unknown or other - adenine, cytosine, thymine, or guanine
ttctgaacacatgcatggcnn

SEQ ID NO: 519 - RNA, 21 nt, Homo sapiens
  source 1..21: mol_type = unassigned RNA
  misc_difference 20: note = modified_base - a, c, t, g, unknown or other - adenine, cytosine, thymine, or guanine
  misc_difference 21: note = modified_base - a, c, t, g, unknown or other - adenine, cytosine, thymine, or guanine
tattccaccacggctgtcann

SEQ ID NO: 520 - RNA, 21 nt, Homo sapiens
  source 1..21: mol_type = unassigned RNA
  misc_difference 20: note = modified_base - a, c, t, g, unknown or other - adenine, cytosine, thymine, or guanine
  misc_difference 21: note = modified_base - a, c, t, g, unknown or other - adenine, cytosine, thymine, or guanine
tgacagccgtggtggaatann

SEQ ID NO: 521 - RNA, 21 nt, Homo sapiens
  source 1..21: mol_type = unassigned RNA
  misc_difference 20: note = modified_base - a, c, t, g, unknown or other - adenine, cytosine, thymine, or guanine
  misc_difference 21: note = modified_base - a, c, t, g, unknown or other - adenine, cytosine, thymine, or guanine
gtcatcaccaatcccaaggnn

SEQ ID NO: 522 - RNA, 21 nt, Homo sapiens
  source 1..21: mol_type = unassigned RNA
  misc_difference 20: note = modified_base - a, c, t, g, unknown or other - adenine, cytosine, thymine, or guanine
  misc_difference 21: note = modified_base - a, c, t, g, unknown or other - adenine, cytosine, thymine, or guanine
ccttgggattggtgatgacnn

SEQ ID NO: 523 - RNA, 21 nt, Homo sapiens
  source 1..21: mol_type = unassigned RNA
  misc_difference 20: note = modified_base - a, c, t, g, unknown or other - adenine, cytosine, thymine, or guanine
  misc_difference 21: note = modified_base - a, c, t, g, unknown or other - adenine, cytosine, thymine, or guanine
gtcctctgatggtcaaagtnn

SEQ ID NO: 524 - RNA, 21 nt, Homo sapiens
  source 1..21: mol_type = unassigned RNA
  misc_difference 20: note = modified_base - a, c, t, g, unknown or other - adenine, cytosine, thymine, or guanine
  misc_difference 21: note = modified_base - a, c, t, g, unknown or other - adenine, cytosine, thymine, or guanine
actttgaccatcagaggacnn

SEQ ID NO: 525 - RNA, 21 nt, Homo sapiens
  source 1..21: mol_type = unassigned RNA
  misc_difference 20: note = modified_base - a, c, t, g, unknown or other - adenine, cytosine, thymine, or guanine
  misc_difference 21: note = modified_base - a, c, t, g, unknown or other - adenine, cytosine, thymine, or guanine
gatggtcaaagttctagatnn

SEQ ID NO: 526 - RNA, 21 nt, Homo sapiens
  source 1..21: mol_type = unassigned RNA
  misc_difference 20: note = modified_base - a, c, t, g, unknown or other - adenine, cytosine, thymine, or guanine
  misc_difference 21: note = modified_base - a, c, t, g, unknown or other - adenine, cytosine, thymine, or guanine
atctagaactttgaccatcnn

SEQ ID NO: 527 - RNA, 21 nt, Homo sapiens
  source 1..21: mol_type = unassigned RNA
  misc_difference 20: note = modified_base - a, c, t, g, unknown or other - adenine, cytosine, thymine, or guanine
  misc_difference 21: note = modified_base - a, c, t, g, unknown or other - adenine, cytosine, thymine, or guanine
atgctgtccgaggcagtccnn

SEQ ID NO: 528 - RNA, 21 nt, Homo sapiens
  source 1..21: mol_type = unassigned RNA
  misc_difference 20: note = modified_base - a, c, t, g, unknown or other - adenine, cytosine, thymine, or guanine
  misc_difference 21: note = modified_base - a, c, t, g, unknown or other - adenine, cytosine, thymine, or guanine
ggactgcctcggacagcatnn

SEQ ID NO: 529 - RNA, 21 nt, Homo sapiens
  source 1..21: mol_type = unassigned RNA
  misc_difference 20: note = modified_base - a, c, t, g, unknown or other - adenine, cytosine, thymine, or guanine
  misc_difference 21: note = modified_base - a, c, t, g, unknown or other - adenine, cytosine, thymine, or guanine
ccgtgcatgtgttcagaaann

SEQ ID NO: 530 - RNA, 21 nt, Homo sapiens
  source 1..21: mol_type = unassigned RNA
  misc_difference 20: note = modified_base - a, c, t, g, unknown or other - adenine, cytosine, thymine, or guanine
  misc_difference 21: note = modified_base - a, c, t, g, unknown or other - adenine, cytosine, thymine, or guanine
tttctgaacacatgcacggnn

SEQ ID NO: 531 - RNA, 21 nt, Homo sapiens
  source 1..21: mol_type = unassigned RNA
  misc_difference 20: note = modified_base - a, c, t, g, unknown or other - adenine, cytosine, thymine, or guanine
  misc_difference 21: note = modified_base - a, c, t, g, unknown or other - adenine, cytosine, thymine, or guanine
agtctggagagctgcatggnn

SEQ ID NO: 532 - RNA, 21 nt, Homo sapiens
  source 1..21: mol_type = unassigned RNA
  misc_difference 20: note = modified_base - a, c, t, g, unknown or other - adenine, cytosine, thymine, or guanine
  misc_difference 21: note = modified_base - a, c, t, g, unknown or other - adenine, cytosine, thymine, or guanine
ccatgcagctctccagactnn

SEQ ID NO: 533 - RNA, 21 nt, Homo sapiens
  source 1..21: mol_type = unassigned RNA
  misc_difference 20: note = modified_base - a, c, t, g, unknown or other - adenine, cytosine, thymine, or guanine
  misc_difference 21: note = modified_base - a, c, t, g, unknown or other - adenine, cytosine, thymine, or guanine
catgggctcacaactgaggnn

SEQ ID NO: 534 - RNA, 21 nt, Homo sapiens
  source 1..21: mol_type = unassigned RNA
  misc_difference 20: note = modified_base - a, c, t, g, unknown or other - adenine, cytosine, thymine, or guanine
  misc_difference 21: note = modified_base - a, c, t, g, unknown or other - adenine, cytosine, thymine, or guanine
cctcagttgtgagcccatgnn

SEQ ID NO: 535 - RNA, 21 nt, Homo sapiens
  source 1..21: mol_type = unassigned RNA
  misc_difference 20: note = modified_base - a, c, t, g, unknown or other - adenine, cytosine, thymine, or guanine
  misc_difference 21: note = modified_base - a, c, t, g, unknown or other - adenine, cytosine, thymine, or guanine
tctcatcgtctgctcctccnn

SEQ ID NO: 536 - RNA, 21 nt, Homo sapiens
  source 1..21: mol_type = unassigned RNA
  misc_difference 20: note = modified_base - a, c, t, g, unknown or other - adenine, cytosine, thymine, or guanine
  misc_difference 21: note = modified_base - a, c, t, g, unknown or other - adenine, cytosine, thymine, or guanine
ggaggagcagacgatgagann

SEQ ID NO: 537 - RNA, 21 nt, Homo sapiens
  source 1..21: mol_type = unassigned RNA
  misc_difference 20: note = modified_base - a, c, t, g, unknown or other - adenine, cytosine, thymine, or guanine
  misc_difference 21: note = modified_base - a, c, t, g, unknown or other - adenine, cytosine, thymine, or guanine
ccccattccatgagcatgcnn

SEQ ID NO: 538 - RNA, 21 nt, Homo sapiens
  source 1..21: mol_type = unassigned RNA
  misc_difference 20: note = modified_base - a, c, t, g, unknown or other - adenine, cytosine, thymine, or guanine
  misc_difference 21: note = modified_base - a, c, t, g, unknown or other - adenine, cytosine, thymine, or guanine
gcatgctcatggaatggggnn

SEQ ID NO: 539 - RNA, 21 nt, Homo sapiens
  source 1..21: mol_type = unassigned RNA
  misc_difference 20: note = modified_base - a, c, t, g, unknown or other - adenine, cytosine, thymine, or guanine
  misc_difference 21: note = modified_base - a, c, t, g, unknown or other - adenine, cytosine, thymine, or guanine
gcccctactcctattccacnn

SEQ ID NO: 540 - RNA, 21 nt, Homo sapiens
  source 1..21: mol_type = unassigned RNA
  misc_difference 20: note = modified_base - a, c, t, g, unknown or other - adenine, cytosine, thymine, or guanine
  misc_difference 21: note = modified_base - a, c, t, g, unknown or other - adenine, cytosine, thymine, or guanine
gtggaataggagtaggggcnn

SEQ ID NO: 541 - RNA, 21 nt, Homo sapiens
  source 1..21: mol_type = unassigned RNA
  misc_difference 20: note = modified_base - a, c, t, g, unknown or other - adenine, cytosine, thymine, or guanine
  misc_difference 21: note = modified_base - a, c, t, g, unknown or other - adenine, cytosine, thymine, or guanine
ctattccaccacggctgtcnn

SEQ ID NO: 542 - RNA, 21 nt, Homo sapiens
  source 1..21: mol_type = unassigned RNA
  misc_difference 20: note = modified_base - a, c, t, g, unknown or other - adenine, cytosine, thymine, or guanine
  misc_difference 21: note = modified_base - a, c, t, g, unknown or other - adenine, cytosine, thymine, or guanine
gacagccgtggtggaatagnn

SEQ ID NO: 543 - RNA, 21 nt, Homo sapiens
  source 1..21: mol_type = unassigned RNA
  misc_difference 20: note = modified_base - a, c, t, g, unknown or other - adenine, cytosine, thymine, or guanine
  misc_difference 21: note = modified_base - a, c, t, g, unknown or other - adenine, cytosine, thymine, or guanine
cacggctgtcgtcaccaatnn

SEQ ID NO: 544 - RNA, 21 nt, Homo sapiens
  source 1..21: mol_type = unassigned RNA
  misc_difference 20: note = modified_base - a, c, t, g, unknown or other - adenine, cytosine, thymine, or guanine
  misc_difference 21: note = modified_base - a, c, t, g, unknown or other - adenine, cytosine, thymine, or guanine
attggtgacgacagccgtgnn

SEQ ID NO: 545 - RNA, 21 nt, Homo sapiens
  source 1..21: mol_type = unassigned RNA
  misc_difference 20: note = modified_base - a, c, t, g, unknown or other - adenine, cytosine, thymine, or guanine
  misc_difference 21: note = modified_base - a, c, t, g, unknown or other - adenine, cytosine, thymine, or guanine
aggacgagggatgggatttnn

SEQ ID NO: 546 - RNA, 21 nt, Homo sapiens
  source 1..21: mol_type = unassigned RNA
  misc_difference 20: note = modified_base - a, c, t, g, unknown or other - adenine, cytosine, thymine, or guanine
  misc_difference 21: note = modified_base - a, c, t, g, unknown or other - adenine, cytosine, thymine, or guanine
aaatcccatccctcgtcctnn

SEQ ID NO: 547 - RNA, 21 nt, Homo sapiens
  source 1..21: mol_type = unassigned RNA
  misc_difference 20: note = modified_base - a, c, t, g, unknown or other - adenine, cytosine, thymine, or guanine
  misc_difference 21: note = modified_base - a, c, t, g, unknown or other - adenine, cytosine, thymine, or guanine
tcacctcatatgctatgttnn

SEQ ID NO: 548 - RNA, 21 nt, Homo sapiens
  source 1..21: mol_type = unassigned RNA
  misc_difference 20: note = modified_base - a, c, t, g, unknown or other - adenine, cytosine, thymine, or guanine
  misc_difference 21: note = modified_base - a, c, t, g, unknown or other - adenine, cytosine, thymine, or guanine
aacatagcatatgaggtgann

SEQ ID NO: 549 - RNA, 21 nt, Homo sapiens
  source 1..21: mol_type = unassigned RNA
  misc_difference 20: note = modified_base - a, c, t, g, unknown or other - adenine, cytosine, thymine, or guanine
  misc_difference 21: note = modified_base - a, c, t, g, unknown or other - adenine, cytosine, thymine, or guanine
cctcatatgctatgttagann

SEQ ID NO: 550 - RNA, 21 nt, Homo sapiens
  source 1..21: mol_type = unassigned RNA
  misc_difference 20: note = modified_base - a, c, t, g, unknown or other - adenine, cytosine, thymine, or guanine
  misc_difference 21: note = modified_base - a, c, t, g, unknown or other - adenine, cytosine, thymine, or guanine
tctaacatagcatatgaggnn

SEQ ID NO: 551 - RNA, 21 nt, Homo sapiens
  source 1..21: mol_type = unassigned RNA
  misc_difference 20: note = modified_base - a, c, t, g, unknown or other - adenine, cytosine, thymine, or guanine
  misc_difference 21: note = modified_base - a, c, t, g, unknown or other - adenine, cytosine, thymine, or guanine
atgttagaagtccaggcagnn

SEQ ID NO: 552 - RNA, 21 nt, Homo sapiens
  source 1..21: mol_type = unassigned RNA
  misc_difference 20: note = modified_base - a, c, t, g, unknown or other - adenine, cytosine, thymine, or guanine
  misc_difference 21: note = modified_base - a, c, t, g, unknown or other - adenine, cytosine, thymine, or guanine
ctgcctggacttctaacatnn

SEQ ID NO: 553 - RNA, 21 nt, Homo sapiens
  source 1..21: mol_type = unassigned RNA
  misc_difference 20: note = modified_base - a, c, t, g, unknown or other - adenine, cytosine, thymine, or guanine
  misc_difference 21: note = modified_base - a, c, t, g, unknown or other - adenine, cytosine, thymine, or guanine
tctgaggctggccctacggnn

SEQ ID NO: 554 - RNA, 21 nt, Homo sapiens
  source 1..21: mol_type = unassigned RNA
  misc_difference 20: note = modified_base - a, c, t, g, unknown or other - adenine, cytosine, thymine, or guanine
  misc_difference 21: note = modified_base - a, c, t, g, unknown or other - adenine, cytosine, thymine, or guanine
ccgtagggccagcctcagann

SEQ ID NO: 555 - RNA, 21 nt, Homo sapiens
  source 1..21: mol_type = unassigned RNA
  misc_difference 20: note = modified_base - a, c, t, g, unknown or other - adenine, cytosine, thymine, or guanine
  misc_difference 21: note = modified_base - a, c, t, g, unknown or other - adenine, cytosine, thymine, or guanine
ggccctacgggcaccggtgnn

SEQ ID NO: 556 - RNA, 21 nt, Homo sapiens
  source 1..21: mol_type = unassigned RNA
  misc_difference 20: note = modified_base - a, c, t, g, unknown or other - adenine, cytosine, thymine, or guanine
  misc_difference 21: note = modified_base - a, c, t, g, unknown or other - adenine, cytosine, thymine, or guanine
caccggtgcccgtagggccnn

SEQ ID NO: 557 - RNA, 21 nt, Homo sapiens
  source 1..21: mol_type = unassigned RNA
  misc_difference 20: note = modified_base - a, c, t, g, unknown or other - adenine, cytosine, thymine, or guanine
  misc_difference 21: note = modified_base - a, c, t, g, unknown or other - adenine, cytosine, thymine, or guanine
gggcaccggtgaatccaagnn

SEQ ID NO: 558 - RNA, 21 nt, Homo sapiens
  source 1..21: mol_type = unassigned RNA
  misc_difference 20: note = modified_base - a, c, t, g, unknown or other - adenine, cytosine, thymine, or guanine
  misc_difference 21: note = modified_base - a, c, t, g, unknown or other - adenine, cytosine, thymine, or guanine
cttggattcaccggtgcccnn

SEQ ID NO: 559 - RNA, 21 nt, Homo sapiens
  source 1..21: mol_type = unassigned RNA
  misc_difference 20: note = modified_base - a, c, t, g, unknown or other - adenine, cytosine, thymine, or guanine
  misc_difference 21: note = modified_base - a, c, t, g, unknown or other - adenine, cytosine, thymine, or guanine
ccatgcatgtgttcagaaann

SEQ ID NO: 560 - RNA, 21 nt, Homo sapiens
  source 1..21: mol_type = unassigned RNA
  misc_difference 20: note = modified_base - a, c, t, g, unknown or other - adenine, cytosine, thymine, or guanine
  misc_difference 21: note = modified_base - a, c, t, g, unknown or other - adenine, cytosine, thymine, or guanine
tttctgaacacatgcatggnn

SEQ ID NO: 561 - DNA, 21 bp, Homo sapiens
  source 1..21: mol_type = unassigned DNA
  misc_feature 1..19: note = RNA
  misc_feature 20..21: note = DNA
ccggtgaatccaagtgtcctt

SEQ ID NO: 562 - DNA, 21 bp, Homo sapiens
  source 1..21: mol_type = unassigned DNA
  misc_feature 1..19: note = RNA
  misc_feature 20..21: note = DNA
ggacacttggattcaccggtt

SEQ ID NO: 563 - DNA, 21 bp, Homo sapiens
  source 1..21: mol_type = unassigned DNA
  misc_feature 1..19: note = RNA
  misc_feature 20..21: note = DNA
actcattcttggcaggatgtt

SEQ ID NO: 564 - DNA, 21 bp, Homo sapiens
  source 1..21: mol_type = unassigned DNA
  misc_feature 1..19: note = RNA
  misc_feature 20..21: note = DNA
catcctgccaagaatgagttt

SEQ ID NO: 565 - DNA, 21 bp, Homo sapiens
  source 1..21: mol_type = unassigned DNA
  misc_feature 1..19: note = RNA
  misc_feature 20..21: note = DNA
aagtgtcctctgatggtcatt

SEQ ID NO: 566 - DNA, 21 bp, Homo sapiens
  source 1..21: mol_type = unassigned DNA
  misc_feature 1..19: note = RNA
  misc_feature 20..21: note = DNA
tgaccatcagaggacactttt

SEQ ID NO: 567 - DNA, 21 bp, Homo sapiens
  source 1..21: mol_type = unassigned DNA
  misc_feature 1..19: note = RNA
  misc_feature 20..21: note = DNA
tcattcttggcaggatggctt

SEQ ID NO: 568 - DNA, 21 bp, Homo sapiens
  source 1..21: mol_type = unassigned DNA
  misc_feature 1..19: note = RNA
  misc_feature 20..21: note = DNA
gccatcctgccaagaatgatt

SEQ ID NO: 569 - DNA, 21 bp, Homo sapiens
  source 1..21: mol_type = unassigned DNA
  misc_feature 1..19: note = RNA
  misc_feature 20..21: note = DNA
aagttctagatgctgtccgtt

SEQ ID NO: 570 - DNA, 21 bp, Homo sapiens
  source 1..21: mol_type = unassigned DNA
  misc_feature 1..19: note = RNA
  misc_feature 20..21: note = DNA
cggacagcatctagaactttt

SEQ ID NO: 571 - DNA, 21 bp, Homo sapiens
  source 1..21: mol_type = unassigned DNA
  misc_feature 1..19: note = RNA
  misc_feature 20..21: note = DNA
gttctagatgctgtccgagtt

SEQ ID NO: 572 - DNA, 21 bp, Homo sapiens
  source 1..21: mol_type = unassigned DNA
  misc_feature 1..19: note = RNA
  misc_feature 20..21: note = DNA
ctcggacagcatctagaactt

SEQ ID NO: 573 - DNA, 21 bp, Homo sapiens
  source 1..21: mol_type = unassigned DNA
  misc_feature 1..19: note = RNA
  misc_feature 20..21: note = DNA
ctagatgctgtccgaggcatt

SEQ ID NO: 574 - DNA, 21 bp, Homo sapiens
  source 1..21: mol_type = unassigned DNA
  misc_feature 1..19: note = RNA
  misc_feature 20..21: note = DNA
tgcctcggacagcatctagtt

SEQ ID NO: 575 - DNA, 21 bp, Homo sapiens
  source 1..21: mol_type = unassigned DNA
  misc_feature 1..19: note = RNA
  misc_feature 20..21: note = DNA
gatgctgtccgaggcagtctt

SEQ ID NO: 576 - DNA, 21 bp, Homo sapiens
  source 1..21: mol_type = unassigned DNA
  misc_feature 1..19: note = RNA
  misc_feature 20..21: note = DNA
gactgcctcggacagcatctt

SEQ ID NO: 577 - DNA, 21 bp, Homo sapiens
  source 1..21: mol_type = unassigned DNA
  misc_feature 1..19: note = RNA
  misc_feature 20..21: note = DNA
cattcttggcaggatggcttt

SEQ ID NO: 578 - DNA, 21 bp, Homo sapiens
  source 1..21: mol_type = unassigned DNA
  misc_feature 1..19: note = RNA
  misc_feature 20..21: note = DNA
agccatcctgccaagaatgtt

SEQ ID NO: 579 - DNA, 21 bp, Homo sapiens
  source 1..21: mol_type = unassigned DNA
  misc_feature 1..19: note = RNA
  misc_feature 20..21: note = DNA
tgctgtccgaggcagtccttt

SEQ ID NO: 580 - DNA, 21 bp, Homo sapiens
  source 1..21: mol_type = unassigned DNA
  misc_feature 1..19: note = RNA
  misc_feature 20..21: note = DNA
aggactgcctcggacagcatt

SEQ ID NO: 581 - DNA, 21 bp, Homo sapiens
  source 1..21: mol_type = unassigned DNA
  misc_feature 1..19: note = RNA
  misc_feature 20..21: note = DNA
ccgaggcagtcctgccatctt

SEQ ID NO: 582 - DNA, 21 bp, Homo sapiens
  source 1..21: mol_type = unassigned DNA
  misc_feature 1..19: note = RNA
  misc_feature 20..21: note = DNA
gatggcaggactgcctcggtt

SEQ ID NO: 583 - DNA, 21 bp, Homo sapiens
  source 1..21: mol_type = unassigned DNA
  misc_feature 1..19: note = RNA
  misc_feature 20..21: note = DNA
cagtcctgccatcaatgtgtt

SEQ ID NO: 584 - DNA, 21 bp, Homo sapiens
  source 1..21: mol_type = unassigned DNA
  misc_feature 1..19: note = RNA
  misc_feature 20..21: note = DNA
cacattgatggcaggactgtt

SEQ ID NO: 585 - DNA, 21 bp, Homo sapiens
  source 1..21: mol_type = unassigned DNA
  misc_feature 1..19: note = RNA
  misc_feature 20..21: note = DNA
caatgtggccgtgcatgtgtt

SEQ ID NO: 586 - DNA, 21 bp, Homo sapiens
  source 1..21: mol_type = unassigned DNA
  misc_feature 1..19: note = RNA
  misc_feature 20..21: note = DNA
cacatgcacggccacattgtt

SEQ ID NO: 587 - DNA, 21 bp, Homo sapiens
  source 1..21: mol_type = unassigned DNA
  misc_feature 1..19: note = RNA
  misc_feature 20..21: note = DNA
atgtgttcagaaaggctgctt

SEQ ID NO: 588 - DNA, 21 bp, Homo sapiens
  source 1..21: mol_type = unassigned DNA
  misc_feature 1..19: note = RNA
  misc_feature 20..21: note = DNA
gcagcctttctgaacacattt

SEQ ID NO: 589 - DNA, 21 bp, Homo sapiens
  source 1..21: mol_type = unassigned DNA
  misc_feature 1..19: note = RNA
  misc_feature 20..21: note = DNA
cagaagtccactcattctttt

SEQ ID NO: 590 - DNA, 21 bp, Homo sapiens
  source 1..21: mol_type = unassigned DNA
  misc_feature 1..19: note = RNA
  misc_feature 20..21: note = DNA
aagaatgagtggacttctgtt

SEQ ID NO: 591 - DNA, 21 bp, Homo sapiens
  source 1..21: mol_type = unassigned DNA
  misc_feature 1..19: note = RNA
  misc_feature 20..21: note = DNA
ggcaggatggcttctcatctt

SEQ ID NO: 592 - DNA, 21 bp, Homo sapiens
  source 1..21: mol_type = unassigned DNA
  misc_feature 1..19: note = RNA
  misc_feature 20..21: note = DNA
gatgagaagccatcctgcctt

SEQ ID NO: 593 - DNA, 21 bp, Homo sapiens
  source 1..21: mol_type = unassigned DNA
  misc_feature 1..19: note = RNA
  misc_feature 20..21: note = DNA
gagccatttgcctctgggatt

SEQ ID NO: 594 - DNA, 21 bp, Homo sapiens
  source 1..21: mol_type = unassigned DNA
  misc_feature 1..19: note = RNA
  misc_feature 20..21: note = DNA
tcccagaggcaaatggctctt

SEQ ID NO: 595 - DNA, 21 bp, Homo sapiens
  source 1..21: mol_type = unassigned DNA
  misc_feature 1..19: note = RNA
  misc_feature 20..21: note = DNA
caggatggcttctcatcgttt

SEQ ID NO: 596 - DNA, 21 bp, Homo sapiens
  source 1..21: mol_type = unassigned DNA
  misc_feature 1..19: note = RNA
  misc_feature 20..21: note = DNA
acgatgagaagccatcctgtt

SEQ ID NO: 597 - DNA, 21 bp, Homo sapiens
  source 1..21: mol_type = unassigned DNA
  misc_feature 1..19: note = RNA
  misc_feature 20..21: note = DNA
aggatggcttctcatcgtctt

SEQ ID NO: 598 - DNA, 21 bp, Homo sapiens
  source 1..21: mol_type = unassigned DNA
  misc_feature 1..19: note = RNA
  misc_feature 20..21: note = DNA
gacgatgagaagccatccttt

SEQ ID NO: 599 - DNA, 21 bp, Homo sapiens
  source 1..21: mol_type = unassigned DNA
  misc_feature 1..19: note = RNA
  misc_feature 20..21: note = DNA
agagctgcatgggctcacatt

SEQ ID NO: 600 - DNA, 21 bp, Homo sapiens
  source 1..21: mol_type = unassigned DNA
  misc_feature 1..19: note = RNA
  misc_feature 20..21: note = DNA
tgtgagcccatgcagctcttt

SEQ ID NO: 601 - DNA, 21 bp, Homo sapiens
  source 1..21: mol_type = unassigned DNA
  misc_feature 1..19: note = RNA
  misc_feature 20..21: note = DNA
gctgcatgggctcacaacttt

SEQ ID NO: 602 - DNA, 21 bp, Homo sapiens
  source 1..21: mol_type = unassigned DNA
  misc_feature 1..19: note = RNA
  misc_feature 20..21: note = DNA
agttgtgagcccatgcagctt

SEQ ID NO: 603 - DNA, 21 bp, Homo sapiens
  source 1..21: mol_type = unassigned DNA
  misc_feature 1..19: note = RNA
  misc_feature 20..21: note = DNA
ggatggcttctcatcgtcttt

SEQ ID NO: 604 - DNA, 21 bp, Homo sapiens
  source 1..21: mol_type = unassigned DNA
  misc_feature 1..19: note = RNA
  misc_feature 20..21: note = DNA
agacgatgagaagccatcctt

SEQ ID NO: 605 - DNA, 21 bp, Homo sapiens
  source 1..21: mol_type = unassigned DNA
  misc_feature 1..19: note = RNA
  misc_feature 20..21: note = DNA
gcatgggctcacaactgagtt

SEQ ID NO: 606 - DNA, 21 bp, Homo sapiens
  source 1..21: mol_type = unassigned DNA
  misc_feature 1..19: note = RNA
  misc_feature 20..21: note = DNA
ctcagttgtgagcccatgctt

SEQ ID NO: 607 - DNA, 21 bp, Homo sapiens
  source 1..21: mol_type = unassigned DNA
  misc_feature 1..19: note = RNA
  misc_feature 20..21: note = DNA
atgggctcacaactgaggatt

SEQ ID NO: 608 - DNA, 21 bp, Homo sapiens
  source 1..21: mol_type = unassigned DNA
  misc_feature 1..19: note = RNA
  misc_feature 20..21: note = DNA
tcctcagttgtgagcccattt

SEQ ID NO: 609 - DNA, 21 bp, Homo sapiens
  source 1..21: mol_type = unassigned DNA
  misc_feature 1..19: note = RNA
  misc_feature 20..21: note = DNA
tgggctcacaactgaggagtt

SEQ ID NO: 610 - DNA, 21 bp, Homo sapiens
  source 1..21: mol_type = unassigned DNA
  misc_feature 1..19: note = RNA
  misc_feature 20..21: note = DNA
ctcctcagttgtgagcccatt

SEQ ID NO: 611 - DNA, 21 bp, Homo sapiens
  source 1..21: mol_type = unassigned DNA
  misc_feature 1..19: note = RNA
  misc_feature 20..21: note = DNA
gaggaatttgtagaagggatt

SEQ ID NO: 612 - DNA, 21 bp, Homo sapiens
  source 1..21: mol_type = unassigned DNA
  misc_feature 1..19: note = RNA
  misc_feature 20..21: note = DNA
tcccttctacaaattcctctt

SEQ ID NO: 613 - DNA, 21 bp, Homo sapiens
  source 1..21: mol_type = unassigned DNA
  misc_feature 1..19: note = RNA
  misc_feature 20..21: note = DNA
tttgtagaagggatatacatt

SEQ ID NO: 614 - DNA, 21 bp, Homo sapiens
  source 1..21: mol_type = unassigned DNA
  misc_feature 1..19: note = RNA
  misc_feature 20..21: note = DNA
tgtatatcccttctacaaatt

SEQ ID NO: 615 - DNA, 21 bp, Homo sapiens
  source 1..21: mol_type = unassigned DNA
  misc_feature 1..19: note = RNA
  misc_feature 20..21: note = DNA
ttgtagaagggatatacaatt

SEQ ID NO: 616 - DNA, 21 bp, Homo sapiens
  source 1..21: mol_type = unassigned DNA
  misc_feature 1..19: note = RNA
  misc_feature 20..21: note = DNA
ttgtatatcccttctacaatt

SEQ ID NO: 617 - DNA, 21 bp, Homo sapiens
  source 1..21: mol_type = unassigned DNA
  misc_feature 1..19: note = RNA
  misc_feature 20..21: note = DNA
tgtagaagggatatacaaatt

SEQ ID NO: 618 - DNA, 21 bp, Homo sapiens
  source 1..21: mol_type = unassigned DNA
  misc_feature 1..19: note = RNA
  misc_feature 20..21: note = DNA
tttgtatatcccttctacatt

SEQ ID NO: 619 - DNA, 21 bp, Homo sapiens
  source 1..21: mol_type = unassigned DNA
  misc_feature 1..19: note = RNA
  misc_feature 20..21: note = DNA
agaagggatatacaaagtgtt

SEQ ID NO: 620 - DNA, 21 bp, Homo sapiens
  source 1..21: mol_type = unassigned DNA
  misc_feature 1..19: note = RNA
  misc_feature 20..21: note = DNA
cactttgtatatcccttcttt

SEQ ID NO: 621 - DNA, 21 bp, Homo sapiens
  source 1..21: mol_type = unassigned DNA
  misc_feature 1..19: note = RNA
  misc_feature 20..21: note = DNA
aagtggaaatagacaccaatt

SEQ ID NO: 622 - DNA, 21 bp, Homo sapiens
  source 1..21: mol_type = unassigned DNA
  misc_feature 1..19: note = RNA
  misc_feature 20..21: note = DNA
ttggtgtctatttccactttt

SEQ ID NO: 623 - DNA, 21 bp, Homo sapiens
  source 1..21: mol_type = unassigned DNA
  misc_feature 1..19: note = RNA
  misc_feature 20..21: note = DNA
ggaaatagacaccaaatcttt

SEQ ID NO: 624 - DNA, 21 bp, Homo sapiens
  source 1..21: mol_type = unassigned DNA
  misc_feature 1..19: note = RNA
  misc_feature 20..21: note = DNA
agatttggtgtctatttcctt

SEQ ID NO: 625 - DNA, 21 bp, Homo sapiens
  source 1..21: mol_type = unassigned DNA
  misc_feature 1..19: note = RNA
  misc_feature 20..21: note = DNA
gaaatagacaccaaatctttt

SEQ ID NO: 626 - DNA, 21 bp, Homo sapiens
  source 1..21: mol_type = unassigned DNA
  misc_feature 1..19: note = RNA
  misc_feature 20..21: note = DNA
aagatttggtgtctatttctt

SEQ ID NO: 627 - DNA, 21 bp, Homo sapiens
  source 1..21: mol_type = unassigned DNA
  misc_feature 1..19: note = RNA
  misc_feature 20..21: note = DNA
atagacaccaaatcttacttt

SEQ ID NO: 628 - DNA, 21 bp, Homo sapiens
  source 1..21: mol_type = unassigned DNA
  misc_feature 1..19: note = RNA
  misc_feature 20..21: note = DNA
agtaagatttggtgtctattt

SEQ ID NO: 629 - DNA, 21 bp, Homo sapiens
  source 1..21: mol_type = unassigned DNA
  misc_feature 1..19: note = RNA
  misc_feature 20..21: note = DNA
tagacaccaaatcttactgtt

SEQ ID NO: 630 - DNA, 21 bp, Homo sapiens
  source 1..21: mol_type = unassigned DNA
  misc_feature 1..19: note = RNA
  misc_feature 20..21: note = DNA
cagtaagatttggtgtctatt

SEQ ID NO: 631 - DNA, 21 bp, Homo sapiens
  source 1..21: mol_type = unassigned DNA
  misc_feature 1..19: note = RNA
  misc_feature 20..21: note = DNA
agacaccaaatcttactggtt

SEQ ID NO: 632 - DNA, 21 bp, Homo sapiens
  source 1..21: mol_type = unassigned DNA
  misc_feature 1..19: note = RNA
  misc_feature 20..21: note = DNA
ccagtaagatttggtgtcttt

SEQ ID NO: 633 - DNA, 21 bp, Homo sapiens
  source 1..21: mol_type = unassigned DNA
  misc_feature 1..19: note = RNA
  misc_feature 20..21: note = DNA
ttactggaaggcacttggctt

SEQ ID NO: 634 - DNA, 21 bp, Homo sapiens
  source 1..21: mol_type = unassigned DNA
  misc_feature 1..19: note = RNA
  misc_feature 20..21: note = DNA
gccaagtgccttccagtaatt

SEQ ID NO: 635 - DNA, 21 bp, Homo sapiens
  source 1..21: mol_type = unassigned DNA
  misc_feature 1..19: note = RNA
  misc_feature 20..21: note = DNA
ttctcatcgtctgctcctctt

SEQ ID NO: 636 - DNA, 21 bp, Homo sapiens
  source 1..21: mol_type = unassigned DNA
  misc_feature 1..19: note = RNA
  misc_feature 20..21: note = DNA
gaggagcagacgatgagaatt

SEQ ID NO: 637 - DNA, 21 bp, Homo sapiens
  source 1..21: mol_type = unassigned DNA
  misc_feature 1..19: note = RNA
  misc_feature 20..21: note = DNA
ggaaggcacttggcatctctt

SEQ ID NO: 638 - DNA, 21 bp, Homo sapiens
  source 1..21: mol_type = unassigned DNA
  misc_feature 1..19: note = RNA
  misc_feature 20..21: note = DNA
gagatgccaagtgccttcctt

SEQ ID NO: 639 - DNA, 21 bp, Homo sapiens
  source 1..21: mol_type = unassigned DNA
  misc_feature 1..19: note = RNA
  misc_feature 20..21: note = DNA
ggcacttggcatctccccatt

SEQ ID NO: 640 - DNA, 21 bp, Homo sapiens
  source 1..21: mol_type = unassigned DNA
  misc_feature 1..19: note = RNA
  misc_feature 20..21: note = DNA
tggggagatgccaagtgcctt

SEQ ID NO: 641 - DNA, 21 bp, Homo sapiens
  source 1..21: mol_type = unassigned DNA
  misc_feature 1..19: note = RNA
  misc_feature 20..21: note = DNA
ggcatctccccattccatgtt

SEQ ID NO: 642 - DNA, 22 bp, Homo sapiens
  source 1..22: mol_type = unassigned DNA
  modified_base 19: mod_base = OTHER; note = Thymine
  modified_base 20: mod_base = OTHER; note = Thymine
  misc_feature 1..20: note = RNA
  misc_feature 21..22: note = DNA
atggaatggggagatgcctttt

SEQ ID NO: 643 - DNA, 21 bp, Homo sapiens
  source 1..21: mol_type = unassigned DNA
  misc_feature 1..19: note = RNA
  misc_feature 20..21: note = DNA
gcatctccccattccatgatt

SEQ ID NO: 644 - DNA, 21 bp, Homo sapiens
  source 1..21: mol_type = unassigned DNA
  misc_feature 1..19: note = RNA
  misc_feature 20..21: note = DNA
tcatggaatggggagatgctt

SEQ ID NO: 645 - DNA, 21 bp, Homo sapiens
  source 1..21: mol_type = unassigned DNA
  misc_feature 1..19: note = RNA
  misc_feature 20..21: note = DNA
catctccccattccatgagtt

SEQ ID NO: 646 - DNA, 21 bp, Homo sapiens
  source 1..21: mol_type = unassigned DNA
  misc_feature 1..19: note = RNA
  misc_feature 20..21: note = DNA
ctcatggaatggggagatgtt

SEQ ID NO: 647 - DNA, 21 bp, Homo sapiens
  source 1..21: mol_type = unassigned DNA
  misc_feature 1..19: note = RNA
  misc_feature 20..21: note = DNA
atctccccattccatgagctt

SEQ ID NO: 648 - DNA, 21 bp, Homo sapiens
  source 1..21: mol_type = unassigned DNA
  misc_feature 1..19: note = RNA
  misc_feature 20..21: note = DNA
gctcatggaatggggagattt

SEQ ID NO: 649 - DNA, 21 bp, Homo sapiens
  source 1..21: mol_type = unassigned DNA
  misc_feature 1..19: note = RNA
  misc_feature 20..21: note = DNA
ctccccattccatgagcattt

SEQ ID NO: 650 - DNA, 21 bp, Homo sapiens
  source 1..21: mol_type = unassigned DNA
  misc_feature 1..19: note = RNA
  misc_feature 20..21: note = DNA
atgctcatggaatggggagtt

SEQ ID NO: 651 - DNA, 21 bp, Homo sapiens
  source 1..21: mol_type = unassigned DNA
  misc_feature 1..19: note = RNA
  misc_feature 20..21: note = DNA
cccattccatgagcatgcatt

SEQ ID NO: 652 - DNA, 21 bp, Homo sapiens
  source 1..21: mol_type = unassigned DNA
  misc_feature 1..19: note = RNA
  misc_feature 20..21: note = DNA
tgcatgctcatggaatgggtt

SEQ ID NO: 653 - DNA, 21 bp, Homo sapiens
  source 1..21: mol_type = unassigned DNA
  misc_feature 1..19: note = RNA
  misc_feature 20..21: note = DNA
ccatgagcatgcagaggtgtt

SEQ ID NO: 654 - DNA, 21 bp, Homo sapiens
  source 1..21: mol_type = unassigned DNA
  misc_feature 1..19: note = RNA
  misc_feature 20..21: note = DNA
cacctctgcatgctcatggtt

SEQ ID NO: 655 - DNA, 21 bp, Homo sapiens
  source 1..21: mol_type = unassigned DNA
  misc_feature 1..19: note = RNA
  misc_feature 20..21: note = DNA
agcatgcagaggtggtatttt

SEQ ID NO: 656 - DNA, 21 bp, Homo sapiens
  source 1..21: mol_type = unassigned DNA
  misc_feature 1..19: note = RNA
  misc_feature 20..21: note = DNA
aataccacctctgcatgcttt

SEQ ID NO: 657 - DNA, 21 bp, Homo sapiens
  source 1..21: mol_type = unassigned DNA
  misc_feature 1..19: note = RNA
  misc_feature 20..21: note = DNA
catgcagaggtggtattcatt

SEQ ID NO: 658 - DNA, 21 bp, Homo sapiens
  source 1..21: mol_type = unassigned DNA
  misc_feature 1..19: note = RNA
  misc_feature 20..21: note = DNA
tgaataccacctctgcatgtt

SEQ ID NO: 659 - DNA, 21 bp, Homo sapiens
  source 1..21: mol_type = unassigned DNA
  misc_feature 1..19: note = RNA
  misc_feature 20..21: note = DNA
atgcagaggtggtattcactt

SEQ ID NO: 660 - DNA, 21 bp, Homo sapiens
  source 1..21: mol_type = unassigned DNA
  misc_feature 1..19: note = RNA
  misc_feature 20..21: note = DNA
gtgaataccacctctgcattt

SEQ ID NO: 661 - DNA, 21 bp, Homo sapiens
  source 1..21: mol_type = unassigned DNA
  misc_feature 1..19: note = RNA
  misc_feature 20..21: note = DNA
ggtggtattcacagccaactt

SEQ ID NO: 662 - DNA, 21 bp, Homo sapiens
  source 1..21: mol_type = unassigned DNA
  misc_feature 1..19: note = RNA
  misc_feature 20..21: note = DNA
gttggctgtgaataccacctt

SEQ ID NO: 663 - DNA, 21 bp, Homo sapiens
  source 1..21: mol_type = unassigned DNA
  misc_feature 1..19: note = RNA
  misc_feature 20..21: note = DNA
gtggtattcacagccaacgtt

SEQ ID NO: 664 - DNA, 21 bp, Homo sapiens
  source 1..21: mol_type = unassigned DNA
  misc_feature 1..19: note = RNA
  misc_feature 20..21: note = DNA
cgttggctgtgaataccactt

SEQ ID NO: 665 - DNA, 21 bp, Homo sapiens
  source 1..21: mol_type = unassigned DNA
  misc_feature 1..19: note = RNA
  misc_feature 20..21: note = DNA
tggtattcacagccaacgatt

SEQ ID NO: 666 - DNA, 21 bp, Homo sapiens
  source 1..21: mol_type = unassigned DNA
  misc_feature 1..19: note = RNA
  misc_feature 20..21: note = DNA
tcgttggctgtgaataccatt

SEQ ID NO: 667 - DNA, 21 bp, Homo sapiens
  source 1..21: mol_type = unassigned DNA
  misc_feature 1..19: note = RNA
  misc_feature 20..21: note = DNA
ggtattcacagccaacgactt

SEQ ID NO: 668 - DNA, 21 bp, Homo sapiens
  source 1..21: mol_type = unassigned DNA
  misc_feature 1..19: note = RNA
  misc_feature 20..21: note = DNA
gtcgttggctgtgaatacctt

SEQ ID NO: 669 - DNA, 21 bp, Homo sapiens
  source 1..21: mol_type = unassigned DNA
  misc_feature 1..19: note = RNA
  misc_feature 20..21: note = DNA
gtattcacagccaacgacttt

SEQ ID NO: 670 - DNA, 21 bp, Homo sapiens
  source 1..21: mol_type = unassigned DNA
  misc_feature 1..19: note = RNA
  misc_feature 20..21: note = DNA
agtcgttggctgtgaatactt

SEQ ID NO: 671 - DNA, 21 bp, Homo sapiens
  source 1..21: mol_type = unassigned DNA
  misc_feature 1..19: note = RNA
  misc_feature 20..21: note = DNA
tattcacagccaacgactctt

SEQ ID NO: 672 - DNA, 21 bp, Homo sapiens
  source 1..21: mol_type = unassigned DNA
  misc_feature 1..19: note = RNA
  misc_feature 20..21: note = DNA
gagtcgttggctgtgaatatt

SEQ ID NO: 673 - DNA, 21 bp, Homo sapiens
  source 1..21: mol_type = unassigned DNA
  misc_feature 1..19: note = RNA
  misc_feature 20..21: note = DNA
tcacagccaacgactccggtt

SEQ ID NO: 674 - DNA, 21 bp, Homo sapiens
  source 1..21: mol_type = unassigned DNA
  misc_feature 1..19: note = RNA
  misc_feature 20..21: note = DNA
ccggagtcgttggctgtgatt

SEQ ID NO: 675 - DNA, 21 bp, Homo sapiens
  source 1..21: mol_type = unassigned DNA
  misc_feature 1..19: note = RNA
  misc_feature 20..21: note = DNA
ccccgccgctacaccattgtt

SEQ ID NO: 676 - DNA, 21 bp, Homo sapiens
  source 1..21: mol_type = unassigned DNA
  misc_feature 1..19: note = RNA
  misc_feature 20..21: note = DNA
caatggtgtagcggcggggtt

SEQ ID NO: 677 - DNA, 21 bp, Homo sapiens
  source 1..21: mol_type = unassigned DNA
  misc_feature 1..19: note = RNA
  misc_feature 20..21: note = DNA
gaagtccactcattcttggtt

SEQ ID NO: 678 - DNA, 21 bp, Homo sapiens
  source 1..21: mol_type = unassigned DNA
  misc_feature 1..19: note = RNA
  misc_feature 20..21: note = DNA
ccaagaatgagtggacttctt

SEQ ID NO: 679 - DNA, 21 bp, Homo sapiens
  source 1..21: mol_type = unassigned DNA
  misc_feature 1..19: note = RNA
  misc_feature 20..21: note = DNA
ccctgctgagcccctactctt

SEQ ID NO: 680 - DNA, 21 bp, Homo sapiens
  source 1..21: mol_type = unassigned DNA
  misc_feature 1..19: note = RNA
  misc_feature 20..21: note = DNA
gagtaggggctcagcagggtt

SEQ ID NO: 681 - DNA, 21 bp, Homo sapiens
  source 1..21: mol_type = unassigned DNA
  misc_feature 1..19: note = RNA
  misc_feature 20..21: note = DNA
ctgagcccctactcctatttt

SEQ ID NO: 682 - DNA, 21 bp, Homo sapiens
  source 1..21: mol_type = unassigned DNA
  misc_feature 1..19: note = RNA
  misc_feature 20..21: note = DNA
aataggagtaggggctcagtt

SEQ ID NO: 683 - DNA, 21 bp, Homo sapiens
  source 1..21: mol_type = unassigned DNA
  misc_feature 1..19: note = RNA
  misc_feature 20..21: note = DNA
tgagcccctactcctattctt

SEQ ID NO: 684 - DNA, 21 bp, Homo sapiens
  source 1..21: mol_type = unassigned DNA
  misc_feature 1..19: note = RNA
  misc_feature 20..21: note = DNA
gaataggagtaggggctcatt

SEQ ID NO: 685 - DNA, 21 bp, Homo sapiens
  source 1..21: mol_type = unassigned DNA
  misc_feature 1..19: note = RNA
  misc_feature 20..21: note = DNA
cccctactcctattccacctt

SEQ ID NO: 686 - DNA, 21 bp, Homo sapiens
  source 1..21: mol_type = unassigned DNA
  misc_feature 1..19: note = RNA
  misc_feature 20..21: note = DNA
ggtggaataggagtaggggtt

SEQ ID NO: 687 - DNA, 21 bp, Homo sapiens
  source 1..21: mol_type = unassigned DNA
  misc_feature 1..19: note = RNA
  misc_feature 20..21: note = DNA
ctactcctattccaccacgtt

SEQ ID NO: 688 - DNA, 21 bp, Homo sapiens
  source 1..21: mol_type = unassigned DNA
  misc_feature 1..19: note = RNA
  misc_feature 20..21: note = DNA
cgtggtggaataggagtagtt

SEQ ID NO: 689 - DNA, 21 bp, Homo sapiens
  source 1..21: mol_type = unassigned DNA
  misc_feature 1..19: note = RNA
  misc_feature 20..21: note = DNA
tactcctattccaccacggtt

SEQ ID NO: 690 - DNA, 21 bp, Homo sapiens
  source 1..21: mol_type = unassigned DNA
  misc_feature 1..19: note = RNA
  misc_feature 20..21: note = DNA
ccgtggtggaataggagtatt

SEQ ID NO: 691 - DNA, 21 bp, Homo sapiens
  source 1..21: mol_type = unassigned DNA
  misc_feature 1..19: note = RNA
  misc_feature 20..21: note = DNA
actcctattccaccacggctt

SEQ ID NO: 692 - DNA, 21 bp, Homo sapiens
  source 1..21: mol_type = unassigned DNA
  misc_feature 1..19: note = RNA
  misc_feature 20..21: note = DNA
gccgtggtggaataggagttt

SEQ ID NO: 693 - DNA, 21 bp, Homo sapiens
  source 1..21: mol_type = unassigned DNA
  misc_feature 1..19: note = RNA
  misc_feature 20..21: note = DNA
tcctattccaccacggctgtt

SEQ ID NO: 694 - DNA, 21 bp, Homo sapiens
  source 1..21: mol_type = unassigned DNA
  misc_feature 1..19: note = RNA
  misc_feature 20..21: note = DNA
cagccgtggtggaataggatt

SEQ ID NO: 695 - DNA, 21 bp, Homo sapiens
  source 1..21: mol_type = unassigned DNA
  misc_feature 1..19: note = RNA
  misc_feature 20..21: note = DNA
tattccaccacggctgtcgtt

SEQ ID NO: 696 - DNA, 21 bp, Homo sapiens
  source 1..21: mol_type = unassigned DNA
  misc_feature 1..19: note = RNA
  misc_feature 20..21: note = DNA
cgacagccgtggtggaatatt

SEQ ID NO: 697 - DNA, 21 bp, Homo sapiens
  source 1..21: mol_type = unassigned DNA
  misc_feature 1..19: note = RNA
  misc_feature 20..21: note = DNA
attccaccacggctgtcgttt

SEQ ID NO: 698 - DNA, 21 bp, Homo sapiens
  source 1..21: mol_type = unassigned DNA
  misc_feature 1..19: note = RNA
  misc_feature 20..21: note = DNA
acgacagccgtggtggaattt

SEQ ID NO: 699 - DNA, 21 bp, Homo sapiens
  source 1..21: mol_type = unassigned DNA
  misc_feature 1..19: note = RNA
  misc_feature 20..21: note = DNA
caccacggctgtcgtcacctt

SEQ ID NO: 700 - DNA, 21 bp, Homo sapiens
  source 1..21: mol_type = unassigned DNA
  misc_feature 1..19: note = RNA
  misc_feature 20..21: note = DNA
ggtgacgacagccgtggtgtt

SEQ ID NO: 701 - DNA, 21 bp, Homo sapiens
  source 1..21: mol_type = unassigned DNA
  misc_feature 1..19: note = RNA
  misc_feature 20..21: note = DNA
accacggctgtcgtcaccatt

SEQ ID NO: 702 - DNA, 21 bp, Homo sapiens
  source 1..21: mol_type = unassigned DNA
  misc_feature 1..19: note = RNA
  misc_feature 20..21: note = DNA
tggtgacgacagccgtggttt

SEQ ID NO: 703 - DNA, 21 bp, Homo sapiens
  source 1..21: mol_type = unassigned DNA
  misc_feature 1..19: note = RNA
  misc_feature 20..21: note = DNA
ccacggctgtcgtcaccaatt

SEQ ID NO: 704 - DNA, 21 bp, Homo sapiens
  source 1..21: mol_type = unassigned DNA
  misc_feature 1..19: note = RNA
  misc_feature 20..21: note = DNA
ttggtgacgacagccgtggtt

SEQ ID NO: 705 - DNA, 21 bp, Homo sapiens
  source 1..21: mol_type = unassigned DNA
  misc_feature 1..19: note = RNA
  misc_feature 20..21: note = DNA
acggctgtcgtcaccaatctt

SEQ ID NO: 706 - DNA, 21 bp, Homo sapiens
  source 1..21: mol_type = unassigned DNA
  misc_feature 1..19: note = RNA
  misc_feature 20..21: note = DNA
gattggtgacgacagccgttt

SEQ ID NO: 707 - DNA, 21 bp, Homo sapiens
  source 1..21: mol_type = unassigned DNA
  misc_feature 1..19: note = RNA
  misc_feature 20..21: note = DNA
cggctgtcgtcaccaatcctt

SEQ ID NO: 708 - DNA, 21 bp, Homo sapiens
  source 1..21: mol_type = unassigned DNA
  misc_feature 1..19: note = RNA
  misc_feature 20..21: note = DNA
ggattggtgacgacagccgtt

SEQ ID NO: 709 - DNA, 21 bp, Homo sapiens
  source 1..21: mol_type = unassigned DNA
  misc_feature 1..19: note = RNA
  misc_feature 20..21: note = DNA
cgtcaccaatcccaaggaatt

SEQ ID NO: 710 - DNA, 21 bp, Homo sapiens
  source 1..21: mol_type = unassigned DNA
  misc_feature 1..19: note = RNA
  misc_feature 20..21: note = DNA
ttccttgggattggtgacgtt

SEQ ID NO: 711 - DNA, 21 bp, Homo sapiens
  source 1..21: mol_type = unassigned DNA
  misc_feature 1..19: note = RNA
  misc_feature 20..21: note = DNA
caatcccaaggaatgagggtt

SEQ ID NO: 712 - DNA, 21 bp, Homo sapiens
  source 1..21: mol_type = unassigned DNA
  misc_feature 1..19: note = RNA
  misc_feature 20..21: note = DNA
ccctcattccttgggattgtt

SEQ ID NO: 713 - DNA, 21 bp, Homo sapiens
  source 1..21: mol_type = unassigned DNA
  misc_feature 1..19: note = RNA
  misc_feature 20..21: note = DNA
cctgaaggacgagggatggtt

SEQ ID NO: 714 - DNA, 21 bp, Homo sapiens
  source 1..21: mol_type = unassigned DNA
  misc_feature 1..19: note = RNA
  misc_feature 20..21: note = DNA
ccatccctcgtccttcaggtt

SEQ ID NO: 715 - DNA, 21 bp, Homo sapiens
  source 1..21: mol_type = unassigned DNA
  misc_feature 1..19: note = RNA
  misc_feature 20..21: note = DNA
ggacgagggatgggatttctt

SEQ ID NO: 716 - DNA, 21 bp, Homo sapiens
  source 1..21: mol_type = unassigned DNA
  misc_feature 1..19: note = RNA
  misc_feature 20..21: note = DNA
gaaatcccatccctcgtcctt

SEQ ID NO: 717 - DNA, 21 bp, Homo sapiens
  source 1..21: mol_type = unassigned DNA
  misc_feature 1..19: note = RNA
  misc_feature 20..21: note = DNA
aagtccactcattcttggctt

SEQ ID NO: 718 - DNA, 21 bp, Homo sapiens
  source 1..21: mol_type = unassigned DNA
  misc_feature 1..19: note = RNA
  misc_feature 20..21: note = DNA
gccaagaatgagtggactttt

SEQ ID NO: 719 - DNA, 21 bp, Homo sapiens
  source 1..21: mol_type = unassigned DNA
  misc_feature 1..19: note = RNA
  misc_feature 20..21: note = DNA
gggatttcatgtaaccaagtt

SEQ ID NO: 720 - DNA, 21 bp, Homo sapiens
  source 1..21: mol_type = unassigned DNA
  misc_feature 1..19: note = RNA
  misc_feature 20..21: note = DNA
cttggttacatgaaatccctt

SEQ ID NO: 721 - DNA, 21 bp, Homo sapiens
  source 1..21: mol_type = unassigned DNA
  misc_feature 1..19: note = RNA
  misc_feature 20..21: note = DNA
ggatttcatgtaaccaagatt

SEQ ID NO: 722 - DNA, 21 bp, Homo sapiens
  source 1..21: mol_type = unassigned DNA
  misc_feature 1..19: note = RNA
  misc_feature 20..21: note = DNA
tcttggttacatgaaatcctt

SEQ ID NO: 723 - DNA, 21 bp, Homo sapiens
  source 1..21: mol_type = unassigned DNA
  misc_feature 1..19: note = RNA
  misc_feature 20..21: note = DNA
tcatgtaaccaagagtatttt

SEQ ID NO: 724 - DNA, 21 bp, Homo sapiens
  source 1..21: mol_type = unassigned DNA
  misc_feature 1..19: note = RNA
  misc_feature 20..21: note = DNA
aatactcttggttacatgatt

SEQ ID NO: 725 - DNA, 21 bp, Homo sapiens
  source 1..21: mol_type = unassigned DNA
  misc_feature 1..19: note = RNA
  misc_feature 20..21: note = DNA
atgtaaccaagagtattcctt

SEQ ID NO: 726 - DNA, 21 bp, Homo sapiens
  source 1..21: mol_type = unassigned DNA
  misc_feature 1..19: note = RNA
  misc_feature 20..21: note = DNA
ggaatactcttggttacattt

SEQ ID NO: 727 - DNA, 21 bp, Homo sapiens
  source 1..21: mol_type = unassigned DNA
  misc_feature 1..19: note = RNA
  misc_feature 20..21: note = DNA
tgtaaccaagagtattccatt

SEQ ID NO: 728 - DNA, 21 bp, Homo sapiens
  source 1..21: mol_type = unassigned DNA
  misc_feature 1..19: note = RNA
  misc_feature 20..21: note = DNA
tggaatactcttggttacatt

SEQ ID NO: 729 - DNA, 21 bp, Homo sapiens
  source 1..21: mol_type = unassigned DNA
  misc_feature 1..19: note = RNA
  misc_feature 20..21: note = DNA
gtaaccaagagtattccattt

SEQ ID NO: 730 - DNA, 21 bp, Homo sapiens
  source 1..21: mol_type = unassigned DNA
  misc_feature 1..19: note = RNA
  misc_feature 20..21: note = DNA
atggaatactcttggttactt

SEQ ID NO: 731 - DNA, 21 bp, Homo sapiens
  source 1..21: mol_type = unassigned DNA
  misc_feature 1..19: note = RNA
  misc_feature 20..21: note = DNA
tgccttgctggactggtattt

SEQ ID NO: 732 - DNA, 21 bp, Homo sapiens
  source 1..21: mol_type = unassigned DNA
  misc_feature 1..19: note = RNA
  misc_feature 20..21: note = DNA
ataccagtccagcaaggcatt

SEQ ID NO: 733 - DNA, 21 bp, Homo sapiens
  source 1..21: mol_type = unassigned DNA
  misc_feature 1..19: note = RNA
  misc_feature 20..21: note = DNA
taaagcagtgttttcaccttt

SEQ ID NO: 734 - DNA, 21 bp, Homo sapiens
  source 1..21: mol_type = unassigned DNA
  misc_feature 1..19: note = RNA
  misc_feature 20..21: note = DNA
aggtgaaaacactgctttatt

SEQ ID NO: 735 - DNA, 21 bp, Homo sapiens
  source 1..21: mol_type = unassigned DNA
  misc_feature 1..19: note = RNA
  misc_feature 20..21: note = DNA
gccttgctggactggtatttt

SEQ ID NO: 736 - DNA, 21 bp, Homo sapiens
  source 1..21: mol_type = unassigned DNA
  misc_feature 1..19: note = RNA
  misc_feature 20..21: note = DNA
aataccagtccagcaaggctt

SEQ ID NO: 737 - DNA, 21 bp, Homo sapiens
  source 1..21: mol_type = unassigned DNA
  misc_feature 1..19: note = RNA
  misc_feature 20..21: note = DNA
tgttttcacctcatatgcttt

SEQ ID NO: 738 - DNA, 21 bp, Homo sapiens
  source 1..21: mol_type = unassigned DNA
  misc_feature 1..19: note = RNA
  misc_feature 20..21: note = DNA
agcatatgaggtgaaaacatt

SEQ ID NO: 739 - DNA, 21 bp, Homo sapiens
  source 1..21: mol_type = unassigned DNA
  misc_feature 1..19: note = RNA
  misc_feature 20..21: note = DNA
gttttcacctcatatgctatt

SEQ ID NO: 740 - DNA, 21 bp, Homo sapiens
  source 1..21: mol_type = unassigned DNA
  misc_feature 1..19: note = RNA
  misc_feature 20..21: note = DNA
tagcatatgaggtgaaaactt

SEQ ID NO: 741 - DNA, 21 bp, Homo sapiens
  source 1..21: mol_type = unassigned DNA
  misc_feature 1..19: note = RNA
  misc_feature 20..21: note = DNA
ttttcacctcatatgctattt

SEQ ID NO: 742 - DNA, 21 bp, Homo sapiens
  source 1..21: mol_type = unassigned DNA
  misc_feature 1..19: note = RNA
  misc_feature 20..21: note = DNA
atagcatatgaggtgaaaatt

SEQ ID NO: 743 - DNA, 21 bp, Homo sapiens
  source 1..21: mol_type = unassigned DNA
  misc_feature 1..19: note = RNA
  misc_feature 20..21: note = DNA
ttcacctcatatgctatgttt

SEQ ID NO: 744 - DNA, 21 bp, Homo sapiens
  source 1..21: mol_type = unassigned DNA
  misc_feature 1..19: note = RNA
  misc_feature 20..21: note = DNA
acatagcatatgaggtgaatt

SEQ ID NO: 745 - DNA, 21 bp, Homo sapiens
  source 1..21: mol_type = unassigned DNA
  misc_feature 1..19: note = RNA
  misc_feature 20..21: note = DNA
cacctcatatgctatgttatt

SEQ ID NO: 746 - DNA, 21 bp, Homo sapiens
  source 1..21: mol_type = unassigned DNA
  misc_feature 1..19: note = RNA
  misc_feature 20..21: note = DNA
taacatagcatatgaggtgtt

SEQ ID NO: 747 - DNA, 21 bp, Homo sapiens
  source 1..21: mol_type = unassigned DNA
  misc_feature 1..19: note = RNA
  misc_feature 20..21: note = DNA
ccttgctggactggtattttt

SEQ ID NO: 748 - DNA, 21 bp, Homo sapiens
  source 1..21: mol_type = unassigned DNA
  misc_feature 1..19: note = RNA
  misc_feature 20..21: note = DNA
aaataccagtccagcaaggtt

SEQ ID NO: 749 - DNA, 21 bp, Homo sapiens
  source 1..21: mol_type = unassigned DNA
  misc_feature 1..19: note = RNA
  misc_feature 20..21: note = DNA
atatgctatgttagaagtctt

SEQ ID NO: 750 - DNA, 21 bp, Homo sapiens
  source 1..21: mol_type = unassigned DNA
  misc_feature 1..19: note = RNA
  misc_feature 20..21: note = DNA
gacttctaacatagcatattt

SEQ ID NO: 751 - DNA, 21 bp, Homo sapiens
  source 1..21: mol_type = unassigned DNA
  misc_feature 1..19: note = RNA
  misc_feature 20..21: note = DNA
tatgctatgttagaagtcctt

SEQ ID NO: 752 - DNA, 21 bp, Homo sapiens
  source 1..21: mol_type = unassigned DNA
  misc_feature 1..19: note = RNA
  misc_feature 20..21: note = DNA
ggacttctaacatagcatatt

SEQ ID NO: 753 - DNA, 21 bp, Homo sapiens
  source 1..21: mol_type = unassigned DNA
  misc_feature 1..19: note = RNA
  misc_feature 20..21: note = DNA
tgctatgttagaagtccagtt

SEQ ID NO: 754 - DNA, 21 bp, Homo sapiens
  source 1..21: mol_type = unassigned DNA
  misc_feature 1..19: note = RNA
  misc_feature 20..21: note = DNA
ctggacttctaacatagcatt

SEQ ID NO: 755 - DNA, 21 bp, Homo sapiens
  source 1..21: mol_type = unassigned DNA
  misc_feature 1..19: note = RNA
  misc_feature 20..21: note = DNA
cttgctggactggtatttgtt

SEQ ID NO: 756 - DNA, 21 bp, Homo sapiens
  source 1..21: mol_type = unassigned DNA
  misc_feature 1..19: note = RNA
  misc_feature 20..21: note = DNA
caaataccagtccagcaagtt

SEQ ID NO: 757 - DNA, 21 bp, Homo sapiens
  source 1..21: mol_type = unassigned DNA
  misc_feature 1..19: note = RNA
  misc_feature 20..21: note = DNA
agtccaggcagagacaatatt

SEQ ID NO: 758 - DNA, 22 bp, Homo sapiens
  source 1..22: mol_type = unassigned DNA
  modified_base 19: mod_base = OTHER; note = Thymine
  modified_base 20: mod_base = OTHER; note = Thymine
  misc_feature 1..20: note = RNA
  misc_feature 21..22: note = DNA
attgtctctgcctggacttttt

SEQ ID NO: 759 - DNA, 21 bp, Homo sapiens
  source 1..21: mol_type = unassigned DNA
  misc_feature 1..19: note = RNA
  misc_feature 20..21: note = DNA
tccaggcagagacaataaatt

SEQ ID NO: 760 - DNA, 21 bp, Homo sapiens
  source 1..21: mol_type = unassigned DNA
  misc_feature 1..19: note = RNA
  misc_feature 20..21: note = DNA
tttattgtctctgcctggatt

SEQ ID NO: 761 - DNA, 21 bp, Homo sapiens
  source 1..21: mol_type = unassigned DNA
  misc_feature 1..19: note = RNA
  misc_feature 20..21: note = DNA
gtgaaaggcacttttcatttt

SEQ ID NO: 762 - DNA, 21 bp, Homo sapiens
  source 1..21: mol_type = unassigned DNA
  misc_feature 1..19: note = RNA
  misc_feature 20..21: note = DNA
aatgaaaagtgcctttcactt

SEQ ID NO: 763 - DNA, 21 bp, Homo sapiens
  source 1..21: mol_type = unassigned DNA
  misc_feature 1..19: note = RNA
  misc_feature 20..21: note = DNA
tggactggtatttgtgtcttt

SEQ ID NO: 764 - DNA, 21 bp, Homo sapiens
  source 1..21: mol_type = unassigned DNA
  misc_feature 1..19: note = RNA
  misc_feature 20..21: note = DNA
agacacaaataccagtccatt

SEQ ID NO: 765 - DNA, 21 bp, Homo sapiens
  source 1..21: mol_type = unassigned DNA
  misc_feature 1..19: note = RNA
  misc_feature 20..21: note = DNA
gtctgaggctggccctacgtt

SEQ ID NO: 766 - DNA, 21 bp, Homo sapiens
  source 1..21: mol_type = unassigned DNA
  misc_feature 1..19: note = RNA
  misc_feature 20..21: note = DNA
cgtagggccagcctcagactt

SEQ ID NO: 767 - DNA, 21 bp, Homo sapiens
  source 1..21: mol_type = unassigned DNA
  misc_feature 1..19: note = RNA
  misc_feature 20..21: note = DNA
ctgaggctggccctacgggtt

SEQ ID NO: 768 - DNA, 21 bp, Homo sapiens
  source 1..21: mol_type = unassigned DNA
  misc_feature 1..19: note = RNA
  misc_feature 20..21: note = DNA
cccgtagggccagcctcagtt

SEQ ID NO: 769 - DNA, 21 bp, Homo sapiens
  source 1..21: mol_type = unassigned DNA
  misc_feature 1..19: note = RNA
  misc_feature 20..21: note = DNA
gaggctggccctacgggcatt

SEQ ID NO: 770 - DNA, 21 bp, Homo sapiens
  source 1..21: mol_type = unassigned DNA
  misc_feature 1..19: note = RNA
  misc_feature 20..21: note = DNA
tgcccgtagggccagcctctt

SEQ ID NO: 771 - DNA, 21 bp, Homo sapiens
  source 1..21: mol_type = unassigned DNA
  misc_feature 1..19: note = RNA
  misc_feature 20..21: note = DNA
aggctggccctacgggcactt

SEQ ID NO: 772 - DNA, 21 bp, Homo sapiens
  source 1..21: mol_type = unassigned DNA
  misc_feature 1..19: note = RNA
  misc_feature 20..21: note = DNA
gtgcccgtagggccagccttt

SEQ ID NO: 773 - DNA, 21 bp, Homo sapiens
  source 1..21: mol_type = unassigned DNA
  misc_feature 1..19: note = RNA
  misc_feature 20..21: note = DNA
gctggccctacgggcaccgtt

SEQ ID NO: 774 - DNA, 21 bp, Homo sapiens
  source 1..21: mol_type = unassigned DNA
  misc_feature 1..19: note = RNA
  misc_feature 20..21: note = DNA
cggtgcccgtagggccagctt

SEQ ID NO: 775 - DNA, 21 bp, Homo sapiens
  source 1..21: mol_type = unassigned DNA
  misc_feature 1..19: note = RNA
  misc_feature 20..21: note = DNA
ctggccctacgggcaccggtt

SEQ ID NO: 776 - DNA, 21 bp, Homo sapiens
  source 1..21: mol_type = unassigned DNA
  misc_feature 1..19: note = RNA
  misc_feature 20..21: note = DNA
ccggtgcccgtagggccagtt

SEQ ID NO: 777 - DNA, 21 bp, Homo sapiens
  source 1..21: mol_type = unassigned DNA
  misc_feature 1..19: note = RNA
  misc_feature 20..21: note = DNA
ggccctacgggcaccggtgtt

SEQ ID NO: 778 - DNA, 21 bp, Homo sapiens
  source 1..21: mol_type = unassigned DNA
  misc_feature 1..19: note = RNA
  misc_feature 20..21: note = DNA
caccggtgcccgtagggcctt

SEQ ID NO: 779 - DNA, 21 bp, Homo sapiens
  source 1..21: mol_type = unassigned DNA
  misc_feature 1..19: note = RNA
  misc_feature 20..21: note = DNA
ccactcattcttggcaggatt

SEQ ID NO: 780 - DNA, 21 bp, Homo sapiens
  source 1..21: mol_type = unassigned DNA
  misc_feature 1..19: note = RNA
  misc_feature 20..21: note = DNA
tcctgccaagaatgagtggtt

SEQ ID NO: 781 - DNA, 21 bp, Homo sapiens
  source 1..21: mol_type = unassigned DNA
  misc_feature 1..19: note = RNA
  misc_feature 20..21: note = DNA
cctacgggcaccggtgaattt

SEQ ID NO: 782 - DNA, 21 bp, Homo sapiens
  source 1..21: mol_type = unassigned DNA
  misc_feature 1..19: note = RNA
  misc_feature 20..21: note = DNA
attcaccggtgcccgtaggtt

SEQ ID NO: 783 - DNA, 21 bp, Homo sapiens
  source 1..21: mol_type = unassigned DNA
  misc_feature 1..19: note = RNA
  misc_feature 20..21: note = DNA
ctacgggcaccggtgaatctt

SEQ ID NO: 784 - DNA, 21 bp, Homo sapiens
  source 1..21: mol_type = unassigned DNA
  misc_feature 1..19: note = RNA
  misc_feature 20..21: note = DNA
gattcaccggtgcccgtagtt

SEQ ID NO: 785 - DNA, 21 bp, Homo sapiens
  source 1..21: mol_type = unassigned DNA
  misc_feature 1..19: note = RNA
  misc_feature 20..21: note = DNA
tacgggcaccggtgaatcctt

SEQ ID NO: 786 - DNA, 21 bp, Homo sapiens
  source 1..21: mol_type = unassigned DNA
  misc_feature 1..19: note = RNA
  misc_feature 20..21: note = DNA
ggattcaccggtgcccgtatt

SEQ ID NO: 787 - DNA, 21 bp, Homo sapiens
  source 1..21: mol_type = unassigned DNA
  misc_feature 1..19: note = RNA
  misc_feature 20..21: note = DNA
acgggcaccggtgaatccatt

SEQ ID NO: 788 - DNA, 21 bp, Homo sapiens
  source 1..21: mol_type = unassigned DNA
  misc_feature 1..19: note = RNA
  misc_feature 20..21: note = DNA
tggattcaccggtgcccgttt

SEQ ID NO: 789 - DNA, 21 bp, Homo sapiens
  source 1..21: mol_type = unassigned DNA
  misc_feature 1..19: note = RNA
  misc_feature 20..21: note = DNA
gcaccggtgaatccaagtgtt

SEQ ID NO: 790 - DNA, 21 bp, Homo sapiens
  source 1..21: mol_type = unassigned DNA
  misc_feature 1..19: note = RNA
  misc_feature 20..21: note = DNA
cacttggattcaccggtgctt

SEQ ID NO: 791 - DNA, 21 bp, Homo sapiens
  source 1..21: mol_type = unassigned DNA
  misc_feature 1..19: note = RNA
  misc_feature 20..21: note = DNA
caccggtgaatccaagtgttt

SEQ ID NO: 792 - DNA, 21 bp, Homo sapiens
  source 1..21: mol_type = unassigned DNA
  misc_feature 1..19: note = RNA
  misc_feature 20..21: note = DNA
acacttggattcaccggtgtt

SEQ ID NO: 793 - DNA, 21 bp, Homo sapiens
  source 1..21: mol_type = unassigned DNA
  misc_feature 1..19: note = RNA
  misc_feature 20..21: note = DNA
tgtggccatgcatgtgttctt

SEQ ID NO: 794 - DNA, 21 bp, Homo sapiens
  source 1..21: mol_type = unassigned DNA
  misc_feature 1..19: note = RNA
  misc_feature 20..21: note = DNA
gaacacatgcatggccacatt

SEQ ID NO: 795 - DNA, 21 bp, Homo sapiens
  source 1..21: mol_type = unassigned DNA
  misc_feature 1..19: note = RNA
  misc_feature 20..21: note = DNA
gtggccatgcatgtgttcatt

SEQ ID NO: 796 - DNA, 21 bp, Homo sapiens
  source 1..21: mol_type = unassigned DNA
  misc_feature 1..19: note = RNA
  misc_feature 20..21: note = DNA
tgaacacatgcatggccactt

SEQ ID NO: 797 - DNA, 21 bp, Homo sapiens
  source 1..21: mol_type = unassigned DNA
  misc_feature 1..19: note = RNA
  misc_feature 20..21: note = DNA
gccatgcatgtgttcagaatt

SEQ ID NO: 798 - DNA, 21 bp, Homo sapiens
  source 1..21: mol_type = unassigned DNA
  misc_feature 1..19: note = RNA
  misc_feature 20..21: note = DNA
ttctgaacacatgcatggctt

SEQ ID NO: 799 - DNA, 21 bp, Homo sapiens
  source 1..21: mol_type = unassigned DNA
  misc_feature 1..19: note = RNA
  misc_feature 20..21: note = DNA
tattccaccacggctgtcatt

SEQ ID NO: 800 - DNA, 21 bp, Homo sapiens
  source 1..21: mol_type = unassigned DNA
  misc_feature 1..19: note = RNA
  misc_feature 20..21: note = DNA
tgacagccgtggtggaatatt

SEQ ID NO: 801 - DNA, 21 bp, Homo sapiens
  source 1..21: mol_type = unassigned DNA
  misc_feature 1..19: note = RNA
  misc_feature 20..21: note = DNA
gtcatcaccaatcccaaggtt

SEQ ID NO: 802 - DNA, 21 bp, Homo sapiens
  source 1..21: mol_type = unassigned DNA
  misc_feature 1..19: note = RNA
  misc_feature 20..21: note = DNA
ccttgggattggtgatgactt

SEQ ID NO: 803 - DNA, 21 bp, Homo sapiens
  source 1..21: mol_type = unassigned DNA
  misc_feature 1..19: note = RNA
  misc_feature 20..21: note = DNA
gtcctctgatggtcaaagttt

SEQ ID NO: 804 - DNA, 21 bp, Homo sapiens
  source 1..21: mol_type = unassigned DNA
  misc_feature 1..19: note = RNA
  misc_feature 20..21: note = DNA
actttgaccatcagaggactt

SEQ ID NO: 805 - DNA, 21 bp, Homo sapiens
  source 1..21: mol_type = unassigned DNA
  misc_feature 1..19: note = RNA
  misc_feature 20..21: note = DNA
gatggtcaaagttctagattt

SEQ ID NO: 806 - DNA, 21 bp, Homo sapiens
  source 1..21: mol_type = unassigned DNA
  misc_feature 1..19: note = RNA
  misc_feature 20..21: note = DNA
atctagaactttgaccatctt

SEQ ID NO: 807 - DNA, 21 bp, Homo sapiens
  source 1..21: mol_type = unassigned DNA
  misc_feature 1..19: note = RNA
  misc_feature 20..21: note = DNA
atgctgtccgaggcagtcctt

SEQ ID NO: 808 - DNA, 21 bp, Homo sapiens
  source 1..21: mol_type = unassigned DNA
  misc_feature 1..19: note = RNA
  misc_feature 20..21: note = DNA
ggactgcctcggacagcattt

SEQ ID NO: 809 - DNA, 21 bp, Homo sapiens
  source 1..21: mol_type = unassigned DNA
  misc_feature 1..19: note = RNA
  misc_feature 20..21: note = DNA
ccgtgcatgtgttcagaaatt

SEQ ID NO: 810 - DNA, 21 bp, Homo sapiens
  source 1..21: mol_type = unassigned DNA
  misc_feature 1..19: note = RNA
  misc_feature 20..21: note = DNA
tttctgaacacatgcacggtt

SEQ ID NO: 811 - DNA, 21 bp, Homo sapiens
  source 1..21: mol_type = unassigned DNA
  misc_feature 1..19: note = RNA
  misc_feature 20..21: note = DNA
agtctggagagctgcatggtt

SEQ ID NO: 812 - DNA, 21 bp, Homo sapiens
  source 1..21: mol_type = unassigned DNA
  misc_feature 1..19: note = RNA
  misc_feature 20..21: note = DNA
ccatgcagctctccagacttt

SEQ ID NO: 813 - DNA, 21 bp, Homo sapiens
  source 1..21: mol_type = unassigned DNA
  misc_feature 1..19: note = RNA
  misc_feature 20..21: note = DNA
catgggctcacaactgaggtt

SEQ ID NO: 814 - DNA, 21 bp, Homo sapiens
  source 1..21: mol_type = unassigned DNA
  misc_feature 1..19: note = RNA
  misc_feature 20..21: note = DNA
cctcagttgtgagcccatgtt

SEQ ID NO: 815 - DNA, 21 bp, Homo sapiens
  source 1..21: mol_type = unassigned DNA
  misc_feature 1..19: note = RNA
  misc_feature 20..21: note = DNA
tctcatcgtctgctcctcctt

SEQ ID NO: 816 - DNA, 21 bp, Homo sapiens
  source 1..21: mol_type = unassigned DNA
  misc_feature 1..19: note = RNA
  misc_feature 20..21: note = DNA
ggaggagcagacgatgagatt

SEQ ID NO: 817 - DNA, 21 bp, Homo sapiens
  source 1..21: mol_type = unassigned DNA
  misc_feature 1..19: note = RNA
  misc_feature 20..21: note = DNA
ccccattccatgagcatgctt

SEQ ID NO: 818 - DNA, 21 bp, Homo sapiens
  source 1..21: mol_type = unassigned DNA
  misc_feature 1..19: note = RNA
  misc_feature 20..21: note = DNA
gcatgctcatggaatggggtt

SEQ ID NO: 819 - DNA, 21 bp, Homo sapiens
  source 1..21: mol_type = unassigned DNA
  misc_feature 1..19: note = RNA
  misc_feature 20..21: note = DNA
gcccctactcctattccactt

SEQ ID NO: 820 - DNA, 21 bp, Homo sapiens
  source 1..21: mol_type = unassigned DNA
  misc_feature 1..19: note = RNA
  misc_feature 20..21: note = DNA
gtggaataggagtaggggctt

SEQ ID NO: 821 - DNA, 21 bp, Homo sapiens
  source 1..21: mol_type = unassigned DNA
  misc_feature 1..19: note = RNA
  misc_feature 20..21: note = DNA
ctattccaccacggctgtctt

SEQ ID NO: 822 - DNA, 21 bp, Homo sapiens
  source 1..21: mol_type = unassigned DNA
  misc_feature 1..19: note = RNA
  misc_feature 20..21: note = DNA
gacagccgtggtggaatagtt

SEQ ID NO: 823 - DNA, 21 bp, Homo sapiens
  source 1..21: mol_type = unassigned DNA
  misc_feature 1..19: note = RNA
  misc_feature 20..21: note = DNA
cacggctgtcgtcaccaattt

SEQ ID NO: 824 - DNA, 21 bp, Homo sapiens
  source 1..21: mol_type = unassigned DNA
  misc_feature 1..19: note = RNA
  misc_feature 20..21: note = DNA
attggtgacgacagccgtgtt

SEQ ID NO: 825 - DNA, 21 bp, Homo sapiens
  source 1..21: mol_type = unassigned DNA
  misc_feature 1..19: note = RNA
  misc_feature 20..21: note = DNA
aggacgagggatgggattttt

SEQ ID NO: 826 - DNA, 21 bp, Homo sapiens
  source 1..21: mol_type = unassigned DNA
  misc_feature 1..19: note = RNA
  misc_feature 20..21: note = DNA
aaatcccatccctcgtccttt

SEQ ID NO: 827 - DNA, 21 bp, Homo sapiens
  source 1..21: mol_type = unassigned DNA
  misc_feature 1..19: note = RNA
  misc_feature 20..21: note = DNA
tcacctcatatgctatgtttt

SEQ ID NO: 828 - DNA, 21 bp, Homo sapiens
  source 1..21: mol_type = unassigned DNA
  misc_feature 1..19: note = RNA
  misc_feature 20..21: note = DNA
aacatagcatatgaggtgatt

SEQ ID NO: 829 - DNA, 21 bp, Homo sapiens
  source 1..21: mol_type = unassigned DNA
  misc_feature 1..19: note = RNA
  misc_feature 20..21: note = DNA
cctcatatgctatgttagatt

SEQ ID NO: 830 - DNA, 21 bp, Homo sapiens
  source 1..21: mol_type = unassigned DNA
  misc_feature 1..19: note = RNA
  misc_feature 20..21: note = DNA
tctaacatagcatatgaggtt

SEQ ID NO: 831 - DNA, 21 bp, Homo sapiens
  source 1..21: mol_type = unassigned DNA
  misc_feature 1..19: note = RNA
  misc_feature 20..21: note = DNA
atgttagaagtccaggcagtt

SEQ ID NO: 832 - DNA, 21 bp, Homo sapiens
  source 1..21: mol_type = unassigned DNA
  misc_feature 1..19: note = RNA
  misc_feature 20..21: note = DNA
ctgcctggacttctaacattt

SEQ ID NO: 833 - DNA, 21 bp, Homo sapiens
  source 1..21: mol_type = unassigned DNA
  misc_feature 1..19: note = RNA
  misc_feature 20..21: note = DNA
tctgaggctggccctacggtt

SEQ ID NO: 834 - DNA, 21 bp, Homo sapiens
  source 1..21: mol_type = unassigned DNA
  misc_feature 1..19: note = RNA
  misc_feature 20..21: note = DNA
ccgtagggccagcctcagatt

SEQ ID NO: 835 - DNA, 21 bp, Homo sapiens
  source 1..21: mol_type = unassigned DNA
  misc_feature 1..19: note = RNA
  misc_feature 20..21: note = DNA
ggccctacgggcaccggtgtt

SEQ ID NO: 836 - DNA, 21 bp, Homo sapiens
  source 1..21: mol_type = unassigned DNA
  misc_feature 1..19: note = RNA
  misc_feature 20..21: note = DNA
caccggtgcccgtagggcctt

SEQ ID NO: 837 - DNA, 21 bp, Homo sapiens
  source 1..21: mol_type = unassigned DNA
  misc_feature 1..19: note = RNA
  misc_feature 20..21: note = DNA
gggcaccggtgaatccaagtt

SEQ ID NO: 838 - DNA, 21 bp, Homo sapiens
  source 1..21: mol_type = unassigned DNA
  misc_feature 1..19: note = RNA
  misc_feature 20..21: note = DNA
cttggattcaccggtgccctt

SEQ ID NO: 839 - DNA, 21 bp, Homo sapiens
  source 1..21: mol_type = unassigned DNA
  misc_feature 1..19: note = RNA
  misc_feature 20..21: note = DNA
ccatgcatgtgttcagaaatt

SEQ ID NO: 840 - DNA, 21 bp, Homo sapiens
  source 1..21: mol_type = unassigned DNA
  misc_feature 1..19: note = RNA
  misc_feature 20..21: note = DNA
tttctgaacacatgcatggtt

SEQ ID NO: 841 - DNA, 21 bp, Homo sapiens
  source 1..21: mol_type = unassigned DNA
  modified_base 1: mod_base = OTHER; note = 2'-O-methylcytidine-3'-phosphate
  modified_base 2: mod_base = OTHER; note = 2'-O-methylcytidine-3'-phosphate
  modified_base 5: mod_base = OTHER; note = 2'-O-methyluridine-3'-phosphate
  modified_base 9: mod_base = OTHER; note = 2'-O-methyluridine-3'-phosphate
  modified_base 10: mod_base = OTHER; note = 2'-O-methylcytidine-3'-phosphate
  modified_base 11: mod_base = OTHER; note = 2'-O-methylcytidine-3'-phosphate
  modified_base 15: mod_base = OTHER; note = 2'-O-methyluridine-3'-phosphate
  modified_base 17: mod_base = OTHER; note = 2'-O-methyluridine-3'-phosphate
  modified_base 18: mod_base = OTHER; note = 2'-O-methylcytidine-3'-phosphate
  modified_base 19: mod_base = OTHER; note = 2'-O-methylcytidine-3'-phosphate
  misc_feature 1..19: note = RNA
  misc_feature 20..21: note = DNA
ccggtgaatccaagtgtcctt

SEQ ID NO: 842 - DNA, 21 bp, Homo sapiens
  source 1..21: mol_type = unassigned DNA
  modified_base 4: mod_base = OTHER; note = 2'-O-methylcytidine-3'-phosphate
  modified_base 14: mod_base = OTHER; note = 2'-O-methylcytidine-3'-phosphate
  misc_feature 1..19: note = RNA
  misc_feature 20..21: note = DNA
ggacacttggattcaccggtt

SEQ ID NO: 843 - DNA, 21 bp, Homo sapiens
  source 1..21: mol_type = unassigned DNA
  modified_base 2: mod_base = OTHER; note = 2'-O-methylcytidine-3'-phosphate
  modified_base 3: mod_base = OTHER; note = 2'-O-methyluridine-3'-phosphate
  modified_base 4: mod_base = OTHER; note = 2'-O-methylcytidine-3'-phosphate
  modified_base 6: mod_base = OTHER; note = 2'-O-methyluridine-3'-phosphate
  modified_base 7: mod_base = OTHER; note = 2'-O-methyluridine-3'-phosphate
  modified_base 8: mod_base = OTHER; note = 2'-O-methylcytidine-3'-phosphate
  modified_base 9: mod_base = OTHER; note = 2'-O-methyluridine-3'-phosphate
  modified_base 10: mod_base = OTHER; note = 2'-O-methyluridine-3'-phosphate
  modified_base 13: mod_base = OTHER; note = 2'-O-methylcytidine-3'-phosphate
  modified_base 18: mod_base = OTHER; note = 2'-O-methyluridine-3'-phosphate
  misc_feature 1..19: note = RNA
  misc_feature 20..21: note = DNA
actcattcttggcaggatgtt

SEQ ID NO: 844 - DNA, 21 bp, Homo sapiens
  source 1..21: mol_type = unassigned DNA
  modified_base 1: mod_base = OTHER; note = 2'-O-methylcytidine-3'-phosphate
  modified_base 9: mod_base = OTHER; note = 2'-O-methylcytidine-3'-phosphate
  misc_feature 1..19: note = RNA
  misc_feature 20..21: note = DNA
catcctgccaagaatgagttt

SEQ ID NO: 845 - DNA, 21 bp, Homo sapiens
  source 1..21: mol_type = unassigned DNA
  modified_base 4: mod_base = OTHER; note = 2'-O-methyluridine-3'-phosphate
  modified_base 6: mod_base = OTHER; note = 2'-O-methyluridine-3'-phosphate
  modified_base 7: mod_base = OTHER; note = 2'-O-methylcytidine-3'-phosphate
  modified_base 8: mod_base = OTHER; note = 2'-O-methylcytidine-3'-phosphate
  modified_base 9: mod_base = OTHER; note = 2'-O-methyluridine-3'-phosphate
  modified_base 10: mod_base = OTHER; note = 2'-O-methylcytidine-3'-phosphate
  modified_base 11: mod_base = OTHER; note = 2'-O-methyluridine-3'-phosphate
  modified_base 14: mod_base = OTHER; note = 2'-O-methyluridine-3'-phosphate
  modified_base 17: mod_base = OTHER; note = 2'-O-methyluridine-3'-phosphate
  modified_base 18: mod_base = OTHER; note = 2'-O-methylcytidine-3'-phosphate
  misc_feature 1..19: note = RNA
  misc_feature 20..21: note = DNA
aagtgtcctctgatggtcatt

SEQ ID NO: 846 - DNA, 21 bp, Homo sapiens
  source 1..21: mol_type = unassigned DNA
  modified_base 5: mod_base = OTHER; note = 2'-O-methylcytidine-3'-phosphate
  modified_base 8: mod_base = OTHER; note = 2'-O-methylcytidine-3'-phosphate
  modified_base 15: mod_base = OTHER; note = 2'-O-methylcytidine-3'-phosphate
  misc_feature 1..19: note = RNA
  misc_feature 20..21: note = DNA
tgaccatcagaggacactttt

SEQ ID NO: 847 - DNA, 21 bp, Homo sapiens
  source 1..21: mol_type = unassigned DNA
  modified_base 1: mod_base = OTHER; note = 2'-O-methyluridine-3'-phosphate
  modified_base 2: mod_base = OTHER; note = 2'-O-methylcytidine-3'-phosphate
  modified_base 4: mod_base = OTHER; note = 2'-O-methyluridine-3'-phosphate
  modified_base 5: mod_base = OTHER; note = 2'-O-methyluridine-3'-phosphate
  modified_base 6: mod_base = OTHER; note = 2'-O-methylcytidine-3'-phosphate
  modified_base 7: mod_base = OTHER; note = 2'-O-methyluridine-3'-phosphate
  modified_base 8: mod_base = OTHER; note = 2'-O-methyluridine-3'-phosphate
  modified_base 11: mod_base = OTHER; note = 2'-O-methylcytidine-3'-phosphate
  modified_base 16: mod_base = OTHER; note = 2'-O-methyluridine-3'-phosphate
  modified_base 19: mod_base = OTHER; note = 2'-O-methylcytidine-3'-phosphate
  misc_feature 1..19: note = RNA
  misc_feature 20..21: note = DNA
tcattcttggcaggatggctt

SEQ ID NO: 848 - DNA, 21 bp, Homo sapiens
  source 1..21: mol_type = unassigned DNA
  modified_base 3: mod_base = OTHER; note = 2'-O-methylcytidine-3'-phosphate
  modified_base 11: mod_base = OTHER; note = 2'-O-methylcytidine-3'-phosphate
  misc_feature 1..19: note = RNA
  misc_feature 20..21: note = DNA
gccatcctgccaagaatgatt

SEQ ID NO: 849 - DNA, 21 bp, Homo sapiens
  source 1..21: mol_type = unassigned DNA
  modified_base 4: mod_base = OTHER; note = 2'-O-methyluridine-3'-phosphate
  modified_base 5: mod_base = OTHER; note = 2'-O-methyluridine-3'-phosphate
  modified_base 6: mod_base = OTHER; note = 2'-O-methylcytidine-3'-phosphate
  modified_base 7: mod_base = OTHER; note = 2'-O-methyluridine-3'-phosphate
  modified_base 11: mod_base = OTHER; note = 2'-O-methyluridine-3'-phosphate
  modified_base 13: mod_base = OTHER; note = 2'-O-methylcytidine-3'-phosphate
  modified_base 14: mod_base = OTHER; note = 2'-O-methyluridine-3'-phosphate
  modified_base 16: mod_base = OTHER; note = 2'-O-methyluridine-3'-phosphate
  modified_base 17: mod_base = OTHER; note = 2'-O-methylcytidine-3'-phosphate
  modified_base 18: mod_base = OTHER; note = 2'-O-methylcytidine-3'-phosphate
  misc_feature 1..19: note = RNA
  misc_feature 20..21: note = DNA
aagttctagatgctgtccgtt

SEQ ID NO: 850 - DNA, 21 bp, Homo sapiens
  source 1..21: mol_type = unassigned DNA
  modified_base 5: mod_base = OTHER; note = 2'-O-methylcytidine-3'-phosphate
  modified_base 8: mod_base = OTHER; note = 2'-O-methylcytidine-3'-phosphate
  modified_base 12: mod_base = OTHER; note = 2'-O-methyluridine-3'-phosphate
  misc_feature 1..19: note = RNA
  misc_feature 20..21: note = DNA
cggacagcatctagaactttt

SEQ ID NO: 851 - DNA, 21 bp, Homo sapiens
  source 1..21: mol_type = unassigned DNA
  modified_base 2: mod_base = OTHER; note = 2'-O-methyluridine-3'-phosphate
  modified_base 3: mod_base = OTHER; note = 2'-O-methyluridine-3'-phosphate
  modified_base 4: mod_base = OTHER; note = 2'-O-methylcytidine-3'-phosphate
  modified_base 5: mod_base = OTHER; note = 2'-O-methyluridine-3'-phosphate
  modified_base 9: mod_base = OTHER; note = 2'-O-methyluridine-3'-phosphate
  modified_base 11: mod_base = OTHER; note = 2'-O-methylcytidine-3'-phosphate
  modified_base 12: mod_base = OTHER; note = 2'-O-methyluridine-3'-phosphate
  modified_base 14: mod_base = OTHER; note = 2'-O-methyluridine-3'-phosphate
  modified_base 15: mod_base = OTHER; note = 2'-O-methylcytidine-3'-phosphate
  modified_base 16: mod_base = OTHER; note = 2'-O-methylcytidine-3'-phosphate
  misc_feature 1..19: note = RNA
  misc_feature 20..21: note = DNA
gttctagatgctgtccgagtt

SEQ ID NO: 852 - DNA, 21 bp, Homo sapiens
  source 1..21: mol_type = unassigned DNA
  modified_base 7: mod_base = OTHER; note = 2'-O-methylcytidine-3'-phosphate
  modified_base 10: mod_base = OTHER; note = 2'-O-methylcytidine-3'-phosphate
  modified_base 14: mod_base = OTHER; note = 2'-O-methyluridine-3'-phosphate
  misc_feature 1..19: note = RNA
  misc_feature 20..21: note = DNA
ctcggacagcatctagaactt

SEQ ID NO: 853 - DNA, 21 bp, Homo sapiens
  source 1..21: mol_type = unassigned DNA
  modified_base 1: mod_base = OTHER; note = 2'-O-methylcytidine-3'-phosphate
  modified_base 2: mod_base = OTHER; note = 2'-O-methyluridine-3'-phosphate
  modified_base 6: mod_base = OTHER; note = 2'-O-methyluridine-3'-phosphate
  modified_base 8: mod_base = OTHER; note = 2'-O-methylcytidine-3'-phosphate
  modified_base 9: mod_base = OTHER; note = 2'-O-methyluridine-3'-phosphate
  modified_base 11: mod_base = OTHER; note = 2'-O-methyluridine-3'-phosphate
  modified_base 12: mod_base = OTHER; note = 2'-O-methylcytidine-3'-phosphate
  modified_base 13: mod_base = OTHER; note = 2'-O-methylcytidine-3'-phosphate
  modified_base 18: mod_base = OTHER; note = 2'-O-methylcytidine-3'-phosphate
  misc_feature 1..19: note = RNA
  misc_feature 20..21: note = DNA
ctagatgctgtccgaggcatt

SEQ ID NO: 854 - DNA, 21 bp, Homo sapiens
  source 1..21: mol_type = unassigned DNA
  modified_base 10: mod_base = OTHER; note = 2'-O-methylcytidine-3'-phosphate
  modified_base 13: mod_base = OTHER; note = 2'-O-methylcytidine-3'-phosphate
  modified_base 17: mod_base = OTHER; note = 2'-O-methyluridine-3'-phosphate
  misc_feature 1..19: note = RNA
  misc_feature 20..21: note = DNA
tgcctcggacagcatctagtt

SEQ ID NO: 855 - DNA, 21 bp, Homo sapiens
  source 1..21: mol_type = unassigned DNA
  modified_base 3: mod_base = OTHER; note = 2'-O-methyluridine-3'-phosphate
  modified_base 5: mod_base = OTHER; note = 2'-O-methylcytidine-3'-phosphate
  modified_base 6: mod_base = OTHER; note = 2'-O-methyluridine-3'-phosphate
  modified_base 8: mod_base = OTHER; note = 2'-O-methyluridine-3'-phosphate
  modified_base 9: mod_base = OTHER; note = 2'-O-methylcytidine-3'-phosphate
  modified_base 10: mod_base = OTHER; note = 2'-O-methylcytidine-3'-phosphate
  modified_base 15: mod_base = OTHER; note = 2'-O-methylcytidine-3'-phosphate
  modified_base 18: mod_base = OTHER; note = 2'-O-methyluridine-3'-phosphate
  modified_base 19: mod_base = OTHER; note = 2'-O-methylcytidine-3'-phosphate
  misc_feature 1..19: note = RNA
  misc_feature 20..21: note = DNA
gatgctgtccgaggcagtctt

SEQ ID NO: 856 - DNA, 21 bp, Homo sapiens
  source 1..21: mol_type = unassigned DNA
  modified_base 13: mod_base = OTHER; note = 2'-O-methylcytidine-3'-phosphate
  modified_base 16: mod_base = OTHER; note = 2'-O-methylcytidine-3'-phosphate
  misc_feature 1..19: note = RNA
  misc_feature 20..21: note = DNA
gactgcctcggacagcatctt

SEQ ID NO: 857 - DNA, 21 bp, Homo sapiens
  source 1..21: mol_type = unassigned DNA
  modified_base 1: mod_base = OTHER; note = 2'-O-methylcytidine-3'-phosphate
  modified_base 3: mod_base = OTHER; note = 2'-O-methyluridine-3'-phosphate
  modified_base 4: mod_base = OTHER; note = 2'-O-methyluridine-3'-phosphate
  modified_base 5: mod_base = OTHER; note = 2'-O-methylcytidine-3'-phosphate
  modified_base 6: mod_base = OTHER; note = 2'-O-methyluridine-3'-phosphate
  modified_base 7: mod_base = OTHER; note = 2'-O-methyluridine-3'-phosphate
  modified_base 10: mod_base = OTHER; note = 2'-O-methylcytidine-3'-phosphate
  modified_base 15: mod_base = OTHER; note = 2'-O-methyluridine-3'-phosphate
  modified_base 18: mod_base = OTHER; note = 2'-O-methylcytidine-3'-phosphate
  modified_base 19: mod_base = OTHER; note = 2'-O-methyluridine-3'-phosphate
  misc_feature 1..19: note = RNA
  misc_feature 20..21: note = DNA
cattcttggcaggatggcttt

SEQ ID NO: 858 - DNA, 21 bp, Homo sapiens
  source 1..21: mol_type = unassigned DNA
  modified_base 4: mod_base = OTHER; note = 2'-O-methylcytidine-3'-phosphate
  modified_base 12: mod_base = OTHER; note = 2'-O-methylcytidine-3'-phosphate
  misc_feature 1..19: note = RNA
  misc_feature 20..21: note = DNA
agccatcctgccaagaatgtt

SEQ ID NO: 859 - DNA, 21 bp, Homo sapiens
  source 1..21: mol_type = unassigned DNA
  modified_base 1: mod_base = OTHER; note = 2'-O-methyluridine-3'-phosphate
  modified_base 3: mod_base = OTHER; note = 2'-O-methylcytidine-3'-phosphate
  modified_base 4: mod_base = OTHER; note = 2'-O-methyluridine-3'-phosphate
  modified_base 6: mod_base = OTHER; note = 2'-O-methyluridine-3'-phosphate
  modified_base 7: mod_base = OTHER; note = 2'-O-methylcytidine-3'-phosphate
  modified_base 8: mod_base = OTHER; note = 2'-O-methylcytidine-3'-phosphate
  modified_base 13: mod_base = OTHER; note = 2'-O-methylcytidine-3'-phosphate
  modified_base 16: mod_base = OTHER; note = 2'-O-methyluridine-3'-phosphate
  modified_base 17: mod_base = OTHER; note = 2'-O-methylcytidine-3'-phosphate
  modified_base 18: mod_base = OTHER; note = 2'-O-methylcytidine-3'-phosphate
  modified_base 19: mod_base = OTHER; note = 2'-O-methyluridine-3'-phosphate
  misc_feature 1..19: note = RNA
  misc_feature 20..21: note = DNA
tgctgtccgaggcagtccttt

SEQ ID NO: 860 - DNA, 21 bp, Homo sapiens
  source 1..21: mol_type = unassigned DNA
  modified_base 15: mod_base = OTHER; note = 2'-O-methylcytidine-3'-phosphate
  modified_base 18: mod_base = OTHER; note = 2'-O-methylcytidine-3'-phosphate
  misc_feature 1..19: note = RNA
  misc_feature 20..21: note = DNA
aggactgcctcggacagcatt

SEQ ID NO: 861 - DNA, 21 bp, Homo sapiens
  source 1..21: mol_type = unassigned DNA
  modified_base 1: mod_base = OTHER; note = 2'-O-methylcytidine-3'-phosphate
  modified_base 2: mod_base = OTHER; note = 2'-O-methylcytidine-3'-phosphate
  modified_base 7: mod_base = OTHER; note = 2'-O-methylcytidine-3'-phosphate
  modified_base 10: mod_base = OTHER; note = 2'-O-methyluridine-3'-phosphate
  modified_base 11: mod_base = OTHER; note = 2'-O-methylcytidine-3'-phosphate
  modified_base 12: mod_base = OTHER; note = 2'-O-methylcytidine-3'-phosphate
  modified_base 13: mod_base = OTHER; note = 2'-O-methyluridine-3'-phosphate
  modified_base 15: mod_base = OTHER; note = 2'-O-methylcytidine-3'-phosphate
  modified_base 16: mod_base = OTHER; note = 2'-O-methylcytidine-3'-phosphate
  modified_base 18: mod_base = OTHER; note = 2'-O-methyluridine-3'-phosphate
  modified_base 19: mod_base = OTHER; note = 2'-O-methylcytidine-3'-phosphate
  misc_feature 1..19: note = RNA
  misc_feature 20..21: note = DNA
ccgaggcagtcctgccatctt

SEQ ID NO: 862 - DNA, 21 bp, Homo sapiens
  source 1..21: mol_type = unassigned DNA
  modified_base 6: mod_base = OTHER; note = 2'-O-methylcytidine-3'-phosphate
  misc_feature 1..19: note = RNA
  misc_feature 20..21: note = DNA
gatggcaggactgcctcggtt

SEQ ID NO: 863 - DNA, 21 bp, Homo sapiens
  source 1..21: mol_type = unassigned DNA
  modified_base 1: mod_base = OTHER; note = 2'-O-methylcytidine-3'-phosphate
  modified_base 4: mod_base = OTHER; note = 2'-O-methyluridine-3'-phosphate
  modified_base 5: mod_base = OTHER; note = 2'-O-methylcytidine-3'-phosphate
  modified_base 6: mod_base = OTHER; note = 2'-O-methylcytidine-3'-phosphate
  modified_base 7: mod_base = OTHER; note = 2'-O-methyluridine-3'-phosphate
  modified_base 9: mod_base = OTHER; note = 2'-O-methylcytidine-3'-phosphate
  modified_base 10: mod_base = OTHER; note = 2'-O-methylcytidine-3'-phosphate
  modified_base 12: mod_base = OTHER; note = 2'-O-methyluridine-3'-phosphate
  modified_base 13: mod_base = OTHER; note = 2'-O-methylcytidine-3'-phosphate
  modified_base 16: mod_base = OTHER; note = 2'-O-methyluridine-3'-phosphate
  modified_base 18: mod_base = OTHER; note = 2'-O-methyluridine-3'-phosphate
  misc_feature 1..19: note = RNA
  misc_feature 20..21: note = DNA
cagtcctgccatcaatgtgtt

SEQ ID NO: 864 - DNA, 21 bp, Homo sapiens
  source 1..21: mol_type = unassigned DNA
  modified_base 1: mod_base = OTHER; note = 2'-O-methylcytidine-3'-phosphate
  modified_base 3: mod_base = OTHER; note = 2'-O-methylcytidine-3'-phosphate
  modified_base 12: mod_base = OTHER; note = 2'-O-methylcytidine-3'-phosphate
  misc_feature 1..19: note = RNA
  misc_feature 20..21: note = DNA
cacattgatggcaggactgtt

SEQ ID NO: 865 - DNA, 21 bp, Homo sapiens
  source 1..21: mol_type = unassigned DNA
  modified_base 1: mod_base = OTHER; note = 2'-O-methylcytidine-3'-phosphate
  modified_base 4: mod_base = OTHER; note = 2'-O-methyluridine-3'-phosphate
  modified_base 6: mod_base = OTHER; note = 2'-O-methyluridine-3'-phosphate
  modified_base 9: mod_base = OTHER; note = 2'-O-methylcytidine-3'-phosphate
  modified_base 10: mod_base = OTHER; note = 2'-O-methylcytidine-3'-phosphate
  modified_base 12: mod_base = OTHER; note = 2'-O-methyluridine-3'-phosphate
  modified_base 14: mod_base = OTHER; note = 2'-O-methylcytidine-3'-phosphate
  modified_base 16: mod_base = OTHER; note = 2'-O-methyluridine-3'-phosphate
  modified_base 18: mod_base = OTHER; note = 2'-O-methyluridine-3'-phosphate
  misc_feature 1..19: note = RNA
  misc_feature 20..21: note = DNA
caatgtggccgtgcatgtgtt

SEQ ID NO: 866 - DNA, 21 bp, Homo sapiens
  source 1..21: mol_type = unassigned DNA
  modified_base 1: mod_base = OTHER; note = 2'-O-methylcytidine-3'-phosphate
  modified_base 3: mod_base = OTHER; note = 2'-O-methylcytidine-3'-phosphate
  modified_base 7: mod_base = OTHER; note = 2'-O-methylcytidine-3'-phosphate
  modified_base 13: mod_base = OTHER; note = 2'-O-methylcytidine-3'-phosphate
  modified_base 15: mod_base = OTHER; note = 2'-O-methylcytidine-3'-phosphate
  misc_feature 1..19: note = RNA
  misc_feature 20..21: note = DNA
cacatgcacggccacattgtt

SEQ ID NO: 867 - DNA, 21 bp, Homo sapiens
  source 1..21: mol_type = unassigned DNA
  modified_base 2: mod_base = OTHER; note = 2'-O-methyluridine-3'-phosphate
  modified_base 4: mod_base = OTHER; note = 2'-O-methyluridine-3'-phosphate
  modified_base 6: mod_base = OTHER; note = 2'-O-methyluridine-3'-phosphate
  modified_base 7: mod_base = OTHER; note = 2'-O-methyluridine-3'-phosphate
  modified_base 8: mod_base = OTHER; note = 2'-O-methylcytidine-3'-phosphate
  modified_base 16: mod_base = OTHER; note = 2'-O-methylcytidine-3'-phosphate
  modified_base 17: mod_base = OTHER; note = 2'-O-methyluridine-3'-phosphate
  modified_base 19: mod_base = OTHER; note = 2'-O-methylcytidine-3'-phosphate
  misc_feature 1..19: note = RNA
  misc_feature 20..21: note = DNA
atgtgttcagaaaggctgctt

SEQ ID NO: 868 - DNA, 21 bp, Homo sapiens
  source 1..21: mol_type = unassigned DNA
  modified_base 2: mod_base = OTHER; note = 2'-O-methylcytidine-3'-phosphate
  modified_base 15: mod_base = OTHER; note = 2'-O-methylcytidine-3'-phosphate
  modified_base 17: mod_base = OTHER; note = 2'-O-methylcytidine-3'-phosphate
  misc_feature 1..19: note = RNA
  misc_feature 20..21: note = DNA
gcagcctttctgaacacattt

SEQ ID NO: 869 - DNA, 21 bp, Homo sapiens
  source 1..21: mol_type = unassigned DNA
  modified_base 1: mod_base = OTHER; note = 2'-O-methylcytidine-3'-phosphate
  modified_base 7: mod_base = OTHER; note = 2'-O-methyluridine-3'-phosphate
  modified_base 8: mod_base = OTHER; note = 2'-O-methylcytidine-3'-phosphate
  modified_base 9: mod_base = OTHER; note = 2'-O-methylcytidine-3'-phosphate
  modified_base 11: mod_base = OTHER; note = 2'-O-methylcytidine-3'-phosphate
  modified_base 12: mod_base = OTHER; note = 2'-O-methyluridine-3'-phosphate
  modified_base 13: mod_base = OTHER; note = 2'-O-methylcytidine-3'-phosphate
  modified_base 15: mod_base = OTHER; note = 2'-O-methyluridine-3'-phosphate
  modified_base 16: mod_base = OTHER; note = 2'-O-methyluridine-3'-phosphate
  modified_base 17: mod_base = OTHER; note = 2'-O-methylcytidine-3'-phosphate
  modified_base 18: mod_base = OTHER; note = 2'-O-methyluridine-3'-phosphate
  modified_base 19: mod_base = OTHER; note = 2'-O-methyluridine-3'-phosphate
  misc_feature 1..19: note = RNA
  misc_feature 20..21: note = DNA
cagaagtccactcattctttt

SEQ ID NO: 870 - DNA, 21 bp, Homo sapiens
  source 1..21: mol_type = unassigned DNA
  misc_feature 1..19: note = RNA
  misc_feature 20..21: note = DNA
aagaatgagtggacttctgtt

SEQ ID NO: 871 - DNA, 21 bp, Homo sapiens
  source 1..21: mol_type = unassigned DNA
  modified_base 3: mod_base = OTHER; note = 2'-O-methylcytidine-3'-phosphate
  modified_base 8: mod_base = OTHER; note = 2'-O-methyluridine-3'-phosphate
  modified_base 11: mod_base = OTHER; note = 2'-O-methylcytidine-3'-phosphate
  modified_base 12: mod_base = OTHER; note = 2'-O-methyluridine-3'-phosphate
  modified_base 13: mod_base = OTHER; note = 2'-O-methyluridine-3'-phosphate
  modified_base 14: mod_base = OTHER; note = 2'-O-methylcytidine-3'-phosphate
  modified_base 15: mod_base = OTHER; note = 2'-O-methyluridine-3'-phosphate
  modified_base 16: mod_base = OTHER; note = 2'-O-methylcytidine-3'-phosphate
  modified_base 18: mod_base = OTHER; note = 2'-O-methyluridine-3'-phosphate
  modified_base 19: mod_base = OTHER; note = 2'-O-methylcytidine-3'-phosphate
  misc_feature 1..19: note = RNA
  misc_feature 20..21: note = DNA
ggcaggatggcttctcatctt

SEQ ID NO: 872 - DNA, 21 bp, Homo sapiens
  source 1..21: mol_type = unassigned DNA
  modified_base 11: mod_base = OTHER; note = 2'-O-methylcytidine-3'-phosphate
  misc_feature 1..19: note = RNA
  misc_feature 20..21: note = DNA
gatgagaagccatcctgcctt

SEQ ID NO: 873 - DNA, 21 bp, Homo sapiens
  source 1..21: mol_type = unassigned DNA
  modified_base 4: mod_base = OTHER; note = 2'-O-methylcytidine-3'-phosphate
  modified_base 5: mod_base = OTHER; note = 2'-O-methylcytidine-3'-phosphate
  modified_base 7: mod_base = OTHER; note = 2'-O-methyluridine-3'-phosphate
  modified_base 8: mod_base = OTHER; note = 2'-O-methyluridine-3'-phosphate
  modified_base 9: mod_base = OTHER; note = 2'-O-methyluridine-3'-phosphate
  modified_base 11: mod_base = OTHER; note = 2'-O-methylcytidine-3'-phosphate
  modified_base 12: mod_base = OTHER; note = 2'-O-methylcytidine-3'-phosphate
  modified_base 13: mod_base = OTHER; note = 2'-O-methyluridine-3'-phosphate
  modified_base 14: mod_base = OTHER; note = 2'-O-methylcytidine-3'-phosphate
  modified_base 15: mod_base = OTHER; note = 2'-O-methyluridine-3'-phosphate
  misc_feature 1..19: note = RNA
  misc_feature 20..21: note = DNA
gagccatttgcctctgggatt

SEQ ID NO: 874 - DNA, 21 bp, Homo sapiens
  source 1..21: mol_type = unassigned DNA
  modified_base 4: mod_base = OTHER; note = 2'-O-methylcytidine-3'-phosphate
  modified_base 10: mod_base = OTHER; note = 2'-O-methylcytidine-3'-phosphate
  misc_feature 1..19: note = RNA
  misc_feature 20..21: note = DNA
tcccagaggcaaatggctctt

SEQ ID NO: 875 - DNA, 21 bp, Homo sapiens
  source 1..21: mol_type = unassigned DNA
  modified_base 1: mod_base = OTHER; note = 2'-O-methylcytidine-3'-phosphate
  modified_base 6: mod_base = OTHER; note = 2'-O-methyluridine-3'-phosphate
  modified_base 9: mod_base = OTHER; note = 2'-O-methylcytidine-3'-phosphate
  modified_base 10: mod_base = OTHER; note = 2'-O-methyluridine-3'-phosphate
  modified_base 11: mod_base = OTHER; note = 2'-O-methyluridine-3'-phosphate
  modified_base 12: mod_base = OTHER; note = 2'-O-methylcytidine-3'-phosphate
  modified_base 13: mod_base = OTHER; note = 2'-O-methyluridine-3'-phosphate
  modified_base 14: mod_base = OTHER; note = 2'-O-methylcytidine-3'-phosphate
  modified_base 16: mod_base = OTHER; note = 2'-O-methyluridine-3'-phosphate
  modified_base 17: mod_base = OTHER; note = 2'-O-methylcytidine-3'-phosphate
  modified_base 19: mod_base = OTHER; note = 2'-O-methyluridine-3'-phosphate
  misc_feature 1..19: note = RNA
  misc_feature 20..21: note = DNA
caggatggcttctcatcgttt

SEQ ID NO: 876 - DNA, 21 bp, Homo sapiens
  source 1..21: mol_type = unassigned DNA
  modified_base 13: mod_base = OTHER; note = 2'-O-methylcytidine-3'-phosphate
  misc_feature 1..19: note = RNA
  misc_feature 20..21: note = DNA
acgatgagaagccatcctgtt

SEQ ID NO: 877 - DNA, 21 bp, Homo sapiens
  source 1..21: mol_type = unassigned DNA
  modified_base 5: mod_base = OTHER; note = 2'-O-methyluridine-3'-phosphate
  modified_base 8: mod_base = OTHER; note = 2'-O-methylcytidine-3'-phosphate
  modified_base 9: mod_base = OTHER; note = 2'-O-methyluridine-3'-phosphate
  modified_base 10: mod_base = OTHER; note = 2'-O-methyluridine-3'-phosphate
  modified_base 11: mod_base = OTHER; note = 2'-O-methylcytidine-3'-phosphate
  modified_base 12: mod_base = OTHER; note = 2'-O-methyluridine-3'-phosphate
  modified_base 13: mod_base = OTHER; note = 2'-O-methylcytidine-3'-phosphate
  modified_base 15: mod_base = OTHER; note = 2'-O-methyluridine-3'-phosphate
  modified_base 16: mod_base = OTHER; note = 2'-O-methylcytidine-3'-phosphate
  modified_base 18: mod_base = OTHER; note = 2'-O-methyluridine-3'-phosphate
  modified_base 19: mod_base = OTHER; note = 2'-O-methylcytidine-3'-phosphate
  misc_feature 1..19: note = RNA
  misc_feature 20..21: note = DNA
aggatggcttctcatcgtctt

SEQ ID NO: 878 - DNA, 21 bp, Homo sapiens
  source 1..21: mol_type = unassigned DNA
  modified_base 14: mod_base = OTHER; note = 2'-O-methylcytidine-3'-phosphate
  misc_feature 1..19: note = RNA
  misc_feature 20..21: note = DNA
gacgatgagaagccatccttt

SEQ ID NO: 879 - DNA, 21 bp, Homo sapiens
  source 1..21: mol_type = unassigned DNA
  modified_base 5: mod_base = OTHER; note = 2'-O-methylcytidine-3'-phosphate
  modified_base 6: mod_base = OTHER; note = 2'-O-methyluridine-3'-phosphate
  modified_base 8: mod_base = OTHER; note = 2'-O-methylcytidine-3'-phosphate
  modified_base 10: mod_base = OTHER; note = 2'-O-methyluridine-3'-phosphate
  modified_base 14: mod_base = OTHER; note = 2'-O-methylcytidine-3'-phosphate
  modified_base 15: mod_base = OTHER; note = 2'-O-methyluridine-3'-phosphate
  modified_base 16: mod_base = OTHER; note = 2'-O-methylcytidine-3'-phosphate
  modified_base 18: mod_base = OTHER; note = 2'-O-methylcytidine-3'-phosphate
  misc_feature 1..19: note = RNA
  misc_feature 20..21: note = DNA
agagctgcatgggctcacatt

SEQ ID NO: 880 - DNA, 21 bp, Homo sapiens
  source 1..21: mol_type = unassigned DNA
  modified_base 9: mod_base = OTHER; note = 2'-O-methylcytidine-3'-phosphate
  modified_base 13: mod_base = OTHER; note = 2'-O-methylcytidine-3'-phosphate
  misc_feature 1..19: note = RNA
  misc_feature 20..21: note = DNA
tgtgagcccatgcagctcttt

SEQ ID NO: 881 - DNA, 21 bp, Homo sapiens
  source 1..21: mol_type = unassigned DNA
  modified_base 2: mod_base = OTHER; note = 2'-O-methylcytidine-3'-phosphate
  modified_base 3: mod_base = OTHER; note = 2'-O-methyluridine-3'-phosphate
  modified_base 5: mod_base = OTHER; note = 2'-O-methylcytidine-3'-phosphate
  modified_base 7: mod_base = OTHER; note = 2'-O-methyluridine-3'-phosphate
  modified_base 11: mod_base = OTHER; note = 2'-O-methylcytidine-3'-phosphate
  modified_base 12: mod_base = OTHER; note = 2'-O-methyluridine-3'-phosphate
  modified_base 13: mod_base = OTHER; note = 2'-O-methylcytidine-3'-phosphate
  modified_base 15: mod_base = OTHER; note = 2'-O-methylcytidine-3'-phosphate
  modified_base 18: mod_base = OTHER; note = 2'-O-methylcytidine-3'-phosphate
  modified_base 19: mod_base = OTHER; note = 2'-O-methyluridine-3'-phosphate
  misc_feature 1..19: note = RNA
  misc_feature 20..21: note = DNA
gctgcatgggctcacaacttt

SEQ ID NO: 882 - DNA, 21 bp, Homo sapiens
  source 1..21: mol_type = unassigned DNA
  modified_base 12: mod_base = OTHER; note = 2'-O-methylcytidine-3'-phosphate
  modified_base 16: mod_base = OTHER; note = 2'-O-methylcytidine-3'-phosphate
  misc_feature 1..19: note = RNA
  misc_feature 20..21: note = DNA
agttgtgagcccatgcagctt

SEQ ID NO: 883 - DNA, 21 bp, Homo sapiens
  source 1..21: mol_type = unassigned DNA
  modified_base 4: mod_base = OTHER; note = 2'-O-methyluridine-3'-phosphate
  modified_base 7: mod_base = OTHER; note = 2'-O-methylcytidine-3'-phosphate
  modified_base 8: mod_base = OTHER; note = 2'-O-methyluridine-3'-phosphate
  modified_base 9: mod_base = OTHER; note = 2'-O-methyluridine-3'-phosphate
  modified_base 10: mod_base = OTHER; note = 2'-O-methylcytidine-3'-phosphate
  modified_base 11: mod_base = OTHER; note = 2'-O-methyluridine-3'-phosphate
  modified_base 12: mod_base = OTHER; note = 2'-O-methylcytidine-3'-phosphate
  modified_base 14: mod_base = OTHER; note = 2'-O-methyluridine-3'-phosphate
  modified_base 15: mod_base = OTHER; note = 2'-O-methylcytidine-3'-phosphate
  modified_base 17: mod_base = OTHER; note = 2'-O-methyluridine-3'-phosphate
  modified_base 18: mod_base = OTHER; note = 2'-O-methylcytidine-3'-phosphate
  modified_base 19: mod_base = OTHER; note = 2'-O-methyluridine-3'-phosphate
  misc_feature 1..19: note = RNA
  misc_feature 20..21: note = DNA
ggatggcttctcatcgtcttt

SEQ ID NO: 884 - DNA, 21 bp, Homo sapiens
  source 1..21: mol_type = unassigned DNA
  modified_base 15: mod_base = OTHER; note = 2'-O-methylcytidine-3'-phosphate
  misc_feature 1..19: note = RNA
  misc_feature 20..21: note = DNA
agacgatgagaagccatcctt

SEQ ID NO: 885 - DNA, 21 bp, Homo sapiens
  source 1..21: mol_type = unassigned DNA
  modified_base 2: mod_base = OTHER; note = 2'-O-methylcytidine-3'-phosphate
  modified_base 4: mod_base = OTHER; note = 2'-O-methyluridine-3'-phosphate
  modified_base 8: mod_base = OTHER; note = 2'-O-methylcytidine-3'-phosphate
  modified_base 9: mod_base = OTHER; note = 2'-O-methyluridine-3'-phosphate
  modified_base 10: mod_base = OTHER; note = 2'-O-methylcytidine-3'-phosphate
  modified_base 12: mod_base = OTHER; note = 2'-O-methylcytidine-3'-phosphate
  modified_base 15: mod_base = OTHER; note = 2'-O-methylcytidine-3'-phosphate
  modified_base 16: mod_base = OTHER; note = 2'-O-methyluridine-3'-phosphate
  misc_feature 1..19: note = RNA
  misc_feature 20..21: note = DNA
gcatgggctcacaactgagtt

SEQ ID NO: 886 - DNA, 21 bp, Homo sapiens
  source 1..21: mol_type = unassigned DNA
  modified_base 3: mod_base = OTHER; note = 2'-O-methylcytidine-3'-phosphate
  modified_base 15: mod_base = OTHER; note = 2'-O-methylcytidine-3'-phosphate
  misc_feature 1..19: note = RNA
  misc_feature 20..21: note = DNA
ctcagttgtgagcccatgctt

SEQ ID NO: 887 - DNA, 21 bp, Homo sapiens
  source 1..21: mol_type = unassigned DNA
  modified_base 2: mod_base = OTHER; note = 2'-O-methyluridine-3'-phosphate
  modified_base 6: mod_base = OTHER; note = 2'-O-methylcytidine-3'-phosphate
  modified_base 7: mod_base = OTHER; note = 2'-O-methyluridine-3'-phosphate
  modified_base 8: mod_base = OTHER; note = 2'-O-methylcytidine-3'-phosphate
  modified_base 10: mod_base = OTHER; note = 2'-O-methylcytidine-3'-phosphate
  modified_base 13: mod_base = OTHER; note = 2'-O-methylcytidine-3'-phosphate
  modified_base 14: mod_base = OTHER; note = 2'-O-methyluridine-3'-phosphate
  misc_feature 1..19: note = RNA
  misc_feature 20..21: note = DNA
atgggctcacaactgaggatt

SEQ ID NO: 888 - DNA, 21 bp, Homo sapiens
  source 1..21: mol_type = unassigned DNA
  modified_base 5: mod_base = OTHER; note = 2'-O-methylcytidine-3'-phosphate
  modified_base 17: mod_base = OTHER; note = 2'-O-methylcytidine-3'-phosphate
  misc_feature 1..19: note = RNA
  misc_feature 20..21: note = DNA
tcctcagttgtgagcccattt

SEQ ID NO: 889 - DNA, 21 bp, Homo sapiens
  source 1..21: mol_type = unassigned DNA
  modified_base 1: mod_base = OTHER; note = 2'-O-methyluridine-3'-phosphate
  modified_base 5: mod_base = OTHER; note = 2'-O-methylcytidine-3'-phosphate
  modified_base 6: mod_base = OTHER; note = 2'-O-methyluridine-3'-phosphate
  modified_base 7: mod_base = OTHER; note = 2'-O-methylcytidine-3'-phosphate
  modified_base 9: mod_base = OTHER; note = 2'-O-methylcytidine-3'-phosphate
  modified_base 12: mod_base = OTHER; note = 2'-O-methylcytidine-3'-phosphate
  modified_base 13: mod_base = OTHER; note = 2'-O-methyluridine-3'-phosphate
  misc_feature 1..19: note = RNA
  misc_feature 20..21: note = DNA
tgggctcacaactgaggagtt

SEQ ID NO: 890 - DNA, 21 bp, Homo sapiens
  source 1..21: mol_type = unassigned DNA
  modified_base 6: mod_base = OTHER; note = 2'-O-methylcytidine-3'-phosphate
  modified_base 18: mod_base = OTHER; note = 2'-O-methylcytidine-3'-phosphate
  misc_feature 1..19: note = RNA
  misc_feature 20..21: note = DNA
ctcctcagttgtgagcccatt

SEQ ID NO: 891 - DNA, 21 bp, Homo sapiens
  source 1..21: mol_type = unassigned DNA
  modified_base 7: mod_base = OTHER; note = 2'-O-methyluridine-3'-phosphate
  modified_base 8: mod_base = OTHER; note = 2'-O-methyluridine-3'-phosphate
  modified_base 9: mod_base = OTHER; note = 2'-O-methyluridine-3'-phosphate
  modified_base 11: mod_base = OTHER; note = 2'-O-methyluridine-3'-phosphate
  misc_feature 1..19: note = RNA
  misc_feature 20..21: note = DNA
gaggaatttgtagaagggatt

SEQ ID NO: 892 - DNA, 21 bp, Homo sapiens
  source 1..21: mol_type = unassigned DNA
  modified_base 8: mod_base = OTHER; note = 2'-O-methyluridine-3'-phosphate
  modified_base 10: mod_base = OTHER; note = 2'-O-methylcytidine-3'-phosphate
  misc_feature 1..19: note = RNA
  misc_feature 20..21: note = DNA
tcccttctacaaattcctctt

SEQ ID NO: 893 - DNA, 21 bp, Homo sapiens
  source 1..21: mol_type = unassigned DNA
  modified_base 1: mod_base = OTHER; note = 2'-O-methyluridine-3'-phosphate
  modified_base 2: mod_base = OTHER; note = 2'-O-methyluridine-3'-phosphate
  modified_base 3: mod_base = OTHER; note = 2'-O-methyluridine-3'-phosphate
  modified_base 5: mod_base = OTHER; note = 2'-O-methyluridine-3'-phosphate
  modified_base 14: mod_base = OTHER; note = 2'-O-methyluridine-3'-phosphate
  modified_base 16: mod_base = OTHER; note = 2'-O-methyluridine-3'-phosphate
  modified_base 18: mod_base = OTHER; note = 2'-O-methylcytidine-3'-phosphate
  misc_feature 1..19: note = RNA
  misc_feature 20..21: note = DNA
tttgtagaagggatatacatt

SEQ ID NO: 894 - DNA, 21 bp, Homo sapiens
  source 1..21: mol_type = unassigned DNA
  modified_base 3: mod_base = OTHER; note = 2'-O-methyluridine-3'-phosphate
  modified_base 5: mod_base = OTHER; note = 2'-O-methyluridine-3'-phosphate
  modified_base 14: mod_base = OTHER; note = 2'-O-methyluridine-3'-phosphate
  modified_base 16: mod_base = OTHER; note = 2'-O-methylcytidine-3'-phosphate
  misc_feature 1..19: note = RNA
  misc_feature 20..21: note = DNA
tgtatatcccttctacaaatt

SEQ ID NO: 895 - DNA, 21 bp, Homo sapiens
  source 1..21: mol_type = unassigned DNA
  modified_base 1: mod_base = OTHER; note = 2'-O-methyluridine-3'-phosphate
  modified_base 2: mod_base = OTHER; note = 2'-O-methyluridine-3'-phosphate
  modified_base 4: mod_base = OTHER; note = 2'-O-methyluridine-3'-phosphate
  modified_base 13: mod_base = OTHER; note = 2'-O-methyluridine-3'-phosphate
  modified_base 15: mod_base = OTHER; note = 2'-O-methyluridine-3'-phosphate
  modified_base 17: mod_base = OTHER; note = 2'-O-methylcytidine-3'-phosphate
  misc_feature 1..19: note = RNA
  misc_feature 20..21: note = DNA
ttgtagaagggatatacaatt

SEQ ID NO: 896 - DNA, 21 bp, Homo sapiens
  source 1..21: mol_type = unassigned DNA
  modified_base 4: mod_base = OTHER; note = 2'-O-methyluridine-3'-phosphate
  modified_base 6: mod_base = OTHER; note = 2'-O-methyluridine-3'-phosphate
  modified_base 15: mod_base = OTHER; note = 2'-O-methyluridine-3'-phosphate
  modified_base 17: mod_base = OTHER; note = 2'-O-methylcytidine-3'-phosphate
  misc_feature 1..19: note = RNA
  misc_feature 20..21: note = DNA
ttgtatatcccttctacaatt

SEQ ID NO: 897 - DNA, 21 bp, Homo sapiens
  source 1..21: mol_type = unassigned DNA
  modified_base 1: mod_base = OTHER; note = 2'-O-methyluridine-3'-phosphate
  modified_base 3: mod_base = OTHER; note = 2'-O-methyluridine-3'-phosphate
  modified_base 12: mod_base = OTHER; note = 2'-O-methyluridine-3'-phosphate
  modified_base 14: mod_base = OTHER; note = 2'-O-methyluridine-3'-phosphate
  modified_base 16: mod_base = OTHER; note = 2'-O-methylcytidine-3'-phosphate
  misc_feature 1..19: note = RNA
  misc_feature 20..21: note = DNA
tgtagaagggatatacaaatt

SEQ ID NO: 898 - DNA, 21 bp, Homo sapiens
  source 1..21: mol_type = unassigned DNA
  modified_base 5: mod_base = OTHER; note = 2'-O-methyluridine-3'-phosphate
  modified_base 7: mod_base = OTHER; note = 2'-O-methyluridine-3'-phosphate
  modified_base 16: mod_base = OTHER; note = 2'-O-methyluridine-3'-phosphate
  modified_base 18: mod_base = OTHER; note = 2'-O-methylcytidine-3'-phosphate
  misc_feature 1..19: note = RNA
  misc_feature 20..21: note = DNA
tttgtatatcccttctacatt

SEQ ID NO: 899 - DNA, 21 bp, Homo sapiens
  source 1..21: mol_type = unassigned DNA
  modified_base 9: mod_base = OTHER; note = 2'-O-methyluridine-3'-phosphate
  modified_base 11: mod_base = OTHER; note = 2'-O-methyluridine-3'-phosphate
  modified_base 13: mod_base = OTHER; note = 2'-O-methylcytidine-3'-phosphate
  modified_base 18: mod_base = OTHER; note = 2'-O-methyluridine-3'-phosphate
  misc_feature 1..19: note = RNA
  misc_feature 20..21: note = DNA
agaagggatatacaaagtgtt

SEQ ID NO: 900 - DNA, 21 bp, Homo sapiens
  source 1..21: mol_type = unassigned DNA
  modified_base 1: mod_base = OTHER; note = 2'-O-methylcytidine-3'-phosphate
  modified_base 8: mod_base = OTHER; note = 2'-O-methyluridine-3'-phosphate
  modified_base 10: mod_base = OTHER; note = 2'-O-methyluridine-3'-phosphate
  misc_feature 1..19: note = RNA
  misc_feature 20..21: note = DNA
cactttgtatatcccttcttt

SEQ ID NO: 901 - DNA, 21 bp, Homo sapiens
  source 1..21: mol_type = unassigned DNA
  modified_base 4: mod_base = OTHER; note = 2'-O-methyluridine-3'-phosphate
  modified_base 10: mod_base = OTHER; note = 2'-O-methyluridine-3'-phosphate
  modified_base 14: mod_base = OTHER; note = 2'-O-methylcytidine-3'-phosphate
  modified_base 16: mod_base = OTHER; note = 2'-O-methylcytidine-3'-phosphate
  modified_base 17: mod_base = OTHER; note = 2'-O-methylcytidine-3'-phosphate
  misc_feature 1..19: note = RNA
  misc_feature 20..21: note = DNA
aagtggaaatagacaccaatt

SEQ ID NO: 902 - DNA, 21 bp, Homo sapiens
  source 1..21: mol_type = unassigned DNA
  modified_base 9: mod_base = OTHER; note = 2'-O-methyluridine-3'-phosphate
  modified_base 15: mod_base = OTHER; note = 2'-O-methylcytidine-3'-phosphate
  misc_feature 1..19: note = RNA
  misc_feature 20..21: note = DNA
ttggtgtctatttccactttt

SEQ ID NO: 903 - DNA, 21 bp, Homo sapiens
  source 1..21: mol_type = unassigned DNA
  modified_base 6: mod_base = OTHER; note = 2'-O-methyluridine-3'-phosphate
  modified_base 10: mod_base = OTHER; note = 2'-O-methylcytidine-3'-phosphate
  modified_base 12: mod_base = OTHER; note = 2'-O-methylcytidine-3'-phosphate
  modified_base 13: mod_base = OTHER; note = 2'-O-methylcytidine-3'-phosphate
  modified_base 17: mod_base = OTHER; note = 2'-O-methyluridine-3'-phosphate
  modified_base 18: mod_base = OTHER; note = 2'-O-methylcytidine-3'-phosphate
  modified_base 19: mod_base = OTHER; note = 2'-O-methyluridine-3'-phosphate
  misc_feature 1..19: note = RNA
  misc_feature 20..21: note = DNA
ggaaatagacaccaaatcttt

SEQ ID NO: 904 - DNA, 21 bp, Homo sapiens
  source 1..21: mol_type = unassigned DNA
  modified_base 13: mod_base = OTHER; note = 2'-O-methyluridine-3'-phosphate
  misc_feature 1..19: note = RNA
  misc_feature 20..21: note = DNA
agatttggtgtctatttcctt

SEQ ID NO: 905 - DNA, 21 bp, Homo sapiens
  source 1..21: mol_type = unassigned DNA
  modified_base 5: mod_base = OTHER; note = 2'-O-methyluridine-3'-phosphate
  modified_base 9: mod_base = OTHER; note = 2'-O-methylcytidine-3'-phosphate
  modified_base 11: mod_base = OTHER; note = 2'-O-methylcytidine-3'-phosphate
  modified_base 12: mod_base = OTHER; note = 2'-O-methylcytidine-3'-phosphate
  modified_base 16: mod_base = OTHER; note = 2'-O-methyluridine-3'-phosphate
  modified_base 17: mod_base = OTHER; note = 2'-O-methylcytidine-3'-phosphate
  modified_base 18: mod_base = OTHER; note = 2'-O-methyluridine-3'-phosphate
  modified_base 19: mod_base = OTHER; note = 2'-O-methyluridine-3'-phosphate
  misc_feature 1..19: note = RNA
  misc_feature 20..21: note = DNA
gaaatagacaccaaatctttt

SEQ ID NO: 906 - DNA, 21 bp, Homo sapiens
  source 1..21: mol_type = unassigned DNA
  modified_base 14: mod_base = OTHER; note = 2'-O-methyluridine-3'-phosphate
  misc_feature 1..19: note = RNA
  misc_feature 20..21: note = DNA
aagatttggtgtctatttctt

SEQ ID NO: 907 - DNA, 21 bp, Homo sapiens
  source 1..21: mol_type = unassigned DNA
  modified_base 2: mod_base = OTHER; note = 2'-O-methyluridine-3'-phosphate
  modified_base 6: mod_base = OTHER; note = 2'-O-methylcytidine-3'-phosphate
  modified_base 8: mod_base = OTHER; note = 2'-O-methylcytidine-3'-phosphate
  modified_base 9: mod_base = OTHER; note = 2'-O-methylcytidine-3'-phosphate
  modified_base 13: mod_base = OTHER; note = 2'-O-methyluridine-3'-phosphate
  modified_base 14: mod_base = OTHER; note = 2'-O-methylcytidine-3'-phosphate
  modified_base 15: mod_base = OTHER; note = 2'-O-methyluridine-3'-phosphate
  modified_base 16: mod_base = OTHER; note = 2'-O-methyluridine-3'-phosphate
  modified_base 18: mod_base = OTHER; note = 2'-O-methylcytidine-3'-phosphate
  modified_base 19: mod_base = OTHER; note = 2'-O-methyluridine-3'-phosphate
  misc_feature 1..19: note = RNA
  misc_feature 20..21: note = DNA
atagacaccaaatcttacttt

SEQ ID NO: 908 - DNA, 21 bp, Homo sapiens
  source 1..21: mol_type = unassigned DNA
  modified_base 3: mod_base = OTHER; note = 2'-O-methyluridine-3'-phosphate
  modified_base 17: mod_base = OTHER; note = 2'-O-methyluridine-3'-phosphate
  misc_feature 1..19: note = RNA
  misc_feature 20..21: note = DNA
agtaagatttggtgtctattt

SEQ ID NO: 909 - DNA, 21 bp, Homo sapiens
  source 1..21: mol_type = unassigned DNA
  modified_base 1: mod_base = OTHER; note = 2'-O-methyluridine-3'-phosphate
  modified_base 5: mod_base = OTHER; note = 2'-O-methylcytidine-3'-phosphate
  modified_base 7: mod_base = OTHER; note = 2'-O-methylcytidine-3'-phosphate
  modified_base 8: mod_base = OTHER; note = 2'-O-methylcytidine-3'-phosphate
  modified_base 12: mod_base = OTHER; note = 2'-O-methyluridine-3'-phosphate
  modified_base 13: mod_base = OTHER; note = 2'-O-methylcytidine-3'-phosphate
  modified_base 14: mod_base = OTHER; note = 2'-O-methyluridine-3'-phosphate
  modified_base 15: mod_base = OTHER; note = 2'-O-methyluridine-3'-phosphate
  modified_base 17: mod_base = OTHER; note = 2'-O-methylcytidine-3'-phosphate
  modified_base 18: mod_base = OTHER; note = 2'-O-methyluridine-3'-phosphate
  misc_feature 1..19: note = RNA
  misc_feature 20..21: note = DNA
tagacaccaaatcttactgtt

SEQ ID NO: 910 - DNA, 21 bp, Homo sapiens
  source 1..21: mol_type = unassigned DNA
  modified_base 1: mod_base = OTHER; note = 2'-O-methylcytidine-3'-phosphate
  modified_base 4: mod_base = OTHER; note = 2'-O-methyluridine-3'-phosphate
  modified_base 18: mod_base = OTHER; note = 2'-O-methyluridine-3'-phosphate
  misc_feature 1..19: note = RNA
  misc_feature 20..21: note = DNA
cagtaagatttggtgtctatt

SEQ ID NO: 911 - DNA, 21 bp, Homo sapiens
  source 1..21: mol_type = unassigned DNA
  modified_base 4: mod_base = OTHER; note = 2'-O-methylcytidine-3'-phosphate
  modified_base 6: mod_base = OTHER; note = 2'-O-methylcytidine-3'-phosphate
  modified_base 7: mod_base = OTHER; note = 2'-O-methylcytidine-3'-phosphate
  modified_base 11: mod_base = OTHER; note = 2'-O-methyluridine-3'-phosphate
  modified_base 12: mod_base = OTHER; note = 2'-O-methylcytidine-3'-phosphate
  modified_base 13: mod_base = OTHER; note = 2'-O-methyluridine-3'-phosphate
  modified_base 14: mod_base = OTHER; note = 2'-O-methyluridine-3'-phosphate
  modified_base 16: mod_base = OTHER; note = 2'-O-methylcytidine-3'-phosphate
  modified_base 17: mod_base = OTHER; note = 2'-O-methyluridine-3'-phosphate
  misc_feature 1..19: note = RNA
  misc_feature 20..21: note = DNA
agacaccaaatcttactggtt

SEQ ID NO: 912 - DNA, 21 bp, Homo sapiens
  source 1..21: mol_type = unassigned DNA
  modified_base 2: mod_base = OTHER; note = 2'-O-methylcytidine-3'-phosphate
  modified_base 5: mod_base = OTHER; note = 2'-O-methyluridine-3'-phosphate
  misc_feature 1..19: note = RNA
  misc_feature 20..21: note = DNA
ccagtaagatttggtgtcttt

SEQ ID NO: 913 - DNA, 21 bp, Homo sapiens
  source 1..21: mol_type = unassigned DNA
  modified_base 1: mod_base = OTHER; note = 2'-O-methyluridine-3'-phosphate
  modified_base 2: mod_base = OTHER; note = 2'-O-methyluridine-3'-phosphate
  modified_base 4: mod_base = OTHER; note = 2'-O-methylcytidine-3'-phosphate
  modified_base 5: mod_base = OTHER; note = 2'-O-methyluridine-3'-phosphate
  modified_base 12: mod_base = OTHER; note = 2'-O-methylcytidine-3'-phosphate
  modified_base 14: mod_base = OTHER; note = 2'-O-methylcytidine-3'-phosphate
  modified_base 15: mod_base = OTHER; note = 2'-O-methyluridine-3'-phosphate
  modified_base 16: mod_base = OTHER; note = 2'-O-methyluridine-3'-phosphate
  modified_base 19: mod_base = OTHER; note = 2'-O-methylcytidine-3'-phosphate
  misc_feature 1..19: note = RNA
  misc_feature 20..21: note = DNA
ttactggaaggcacttggctt

SEQ ID NO: 914 - DNA, 21 bp, Homo sapiens
  source 1..21: mol_type = unassigned DNA
  modified_base 3: mod_base = OTHER; note = 2'-O-methylcytidine-3'-phosphate
  modified_base 14: mod_base = OTHER; note = 2'-O-methylcytidine-3'-phosphate
  modified_base 17: mod_base = OTHER; note = 2'-O-methyluridine-3'-phosphate
  misc_feature 1..19: note = RNA
  misc_feature 20..21: note = DNA
gccaagtgccttccagtaatt

SEQ ID NO: 915 - DNA, 21 bp, Homo sapiens
  source 1..21: mol_type = unassigned DNA
  modified_base 1: mod_base = OTHER; note = 2'-O-methyluridine-3'-phosphate
  modified_base 2: mod_base = OTHER; note = 2'-O-methyluridine-3'-phosphate
  modified_base 3: mod_base = OTHER; note = 2'-O-methylcytidine-3'-phosphate
  modified_base 4: mod_base = OTHER; note = 2'-O-methyluridine-3'-phosphate
  modified_base 5: mod_base = OTHER; note = 2'-O-methylcytidine-3'-phosphate
  modified_base 7: mod_base = OTHER; note = 2'-O-methyluridine-3'-phosphate
  modified_base 8: mod_base = OTHER; note = 2'-O-methylcytidine-3'-phosphate
  modified_base 10: mod_base = OTHER; note = 2'-O-methyluridine-3'-phosphate
  modified_base 11: mod_base = OTHER; note = 2'-O-methylcytidine-3'-phosphate
  modified_base 12: mod_base = OTHER; note = 2'-O-methyluridine-3'-phosphate
  modified_base 14: mod_base = OTHER; note = 2'-O-methylcytidine-3'-phosphate
  modified_base 15: mod_base = OTHER; note = 2'-O-methyluridine-3'-phosphate
  modified_base 16: mod_base = OTHER; note = 2'-O-methylcytidine-3'-phosphate
  modified_base 17: mod_base = OTHER; note = 2'-O-methylcytidine-3'-phosphate
  modified_base 18: mod_base = OTHER; note = 2'-O-methyluridine-3'-phosphate
  modified_base 19: mod_base = OTHER; note = 2'-O-methylcytidine-3'-phosphate
  misc_feature 1..19: note = RNA
  misc_feature 20..21: note = DNA
ttctcatcgtctgctcctctt

SEQ ID NO: 916 - DNA, 21 bp, Homo sapiens
  source 1..21: mol_type = unassigned DNA
  modified_base 7: mod_base = OTHER; note = 2'-O-methylcytidine-3'-phosphate
  misc_feature 1..19: note = RNA
  misc_feature 20..21: note = DNA
gaggagcagacgatgagaatt

SEQ ID NO: 917 - DNA, 21 bp, Homo sapiens
  source 1..21: mol_type = unassigned DNA
  modified_base 7: mod_base = OTHER; note = 2'-O-methylcytidine-3'-phosphate
  modified_base 9: mod_base = OTHER; note = 2'-O-methylcytidine-3'-phosphate
  modified_base 10: mod_base = OTHER; note = 2'-O-methyluridine-3'-phosphate
  modified_base 11: mod_base = OTHER; note = 2'-O-methyluridine-3'-phosphate
  modified_base 14: mod_base = OTHER; note = 2'-O-methylcytidine-3'-phosphate
  modified_base 16: mod_base = OTHER; note = 2'-O-methyluridine-3'-phosphate
  modified_base 17: mod_base = OTHER; note = 2'-O-methylcytidine-3'-phosphate
  modified_base 18: mod_base = OTHER; note = 2'-O-methyluridine-3'-phosphate
  modified_base 19: mod_base = OTHER; note = 2'-O-methylcytidine-3'-phosphate
  misc_feature 1..19: note = RNA
  misc_feature 20..21: note = DNA
ggaaggcacttggcatctctt

SEQ ID NO: 918 - DNA, 21 bp, Homo sapiens
  source 1..21: mol_type = unassigned DNA
  modified_base 8: mod_base = OTHER; note = 2'-O-methylcytidine-3'-phosphate
  misc_feature 1..19: note = RNA
  misc_feature 20..21: note = DNA
gagatgccaagtgccttcctt

SEQ ID NO: 919 - DNA, 21 bp, Homo sapiens
  source 1..21: mol_type = unassigned DNA
  modified_base 3: mod_base = OTHER; note = 2'-O-methylcytidine-3'-phosphate
  modified_base 5: mod_base = OTHER; note = 2'-O-methylcytidine-3'-phosphate
  modified_base 6: mod_base = OTHER; note = 2'-O-methyluridine-3'-phosphate
  modified_base 7: mod_base = OTHER; note = 2'-O-methyluridine-3'-phosphate
  modified_base 10: mod_base = OTHER; note = 2'-O-methylcytidine-3'-phosphate
  modified_base 12: mod_base = OTHER; note = 2'-O-methyluridine-3'-phosphate
  modified_base 13: mod_base = OTHER; note = 2'-O-methylcytidine-3'-phosphate
  modified_base 14: mod_base = OTHER; note = 2'-O-methyluridine-3'-phosphate
  modified_base 15: mod_base = OTHER; note = 2'-O-methylcytidine-3'-phosphate
  modified_base 16: mod_base = OTHER; note = 2'-O-methylcytidine-3'-phosphate
  modified_base 17: mod_base = OTHER; note = 2'-O-methylcytidine-3'-phosphate
  modified_base 18: mod_base = OTHER; note = 2'-O-methylcytidine-3'-phosphate
  misc_feature 1..19: note = RNA
  misc_feature 20..21: note = DNA
ggcacttggcatctccccatt

SEQ ID NO: 920 - DNA, 21 bp, Homo sapiens
  source 1..21: mol_type = unassigned DNA
  modified_base 12: mod_base = OTHER; note = 2'-O-methylcytidine-3'-phosphate
  misc_feature 1..19: note = RNA
  misc_feature 20..21: note = DNA
tggggagatgccaagtgcctt

SEQ ID NO: 921 - DNA, 21 bp, Homo sapiens
  source 1..21: mol_type = unassigned DNA
  modified_base 3: mod_base = OTHER; note = 2'-O-methylcytidine-3'-phosphate
  modified_base 5: mod_base = OTHER; note = 2'-O-methyluridine-3'-phosphate
  modified_base 6: mod_base = OTHER; note = 2'-O-methylcytidine-3'-phosphate
  modified_base 7: mod_base = OTHER; note = 2'-O-methyluridine-3'-phosphate
  modified_base 8: mod_base = OTHER; note = 2'-O-methylcytidine-3'-phosphate
  modified_base 9: mod_base = OTHER; note = 2'-O-methylcytidine-3'-phosphate
  modified_base 10: mod_base = OTHER; note = 2'-O-methylcytidine-3'-phosphate
  modified_base 11: mod_base = OTHER; note = 2'-O-methylcytidine-3'-phosphate
  modified_base 13: mod_base = OTHER; note = 2'-O-methyluridine-3'-phosphate
  modified_base 14: mod_base = OTHER; note = 2'-O-methyluridine-3'-phosphate
  modified_base 15: mod_base = OTHER; note = 2'-O-methylcytidine-3'-phosphate
  modified_base 16: mod_base = OTHER; note = 2'-O-methylcytidine-3'-phosphate
  modified_base 18: mod_base = OTHER; note = 2'-O-methyluridine-3'-phosphate
  misc_feature 1..19: note = RNA
  misc_feature 20..21: note = DNA
ggcatctccccattccatgtt

SEQ ID NO: 922 - DNA, 21 bp, Homo sapiens
  source 1..21: mol_type = unassigned DNA
  modified_base 1: mod_base = OTHER; note = 2'-O-methylcytidine-3'-phosphate
  misc_feature 1..19: note = RNA
  misc_feature 20..21: note = DNA
catggaatggggagatgcctt

SEQ ID NO: 923 - DNA, 21 bp, Homo sapiens
  source 1..21: mol_type = unassigned DNA
  modified_base 2: mod_base = OTHER; note = 2'-O-methylcytidine-3'-phosphate
  modified_base 4: mod_base = OTHER; note = 2'-O-methyluridine-3'-phosphate
  modified_base 5: mod_base = OTHER; note = 2'-O-methylcytidine-3'-phosphate
  modified_base 6: mod_base = OTHER; note = 2'-O-methyluridine-3'-phosphate
  modified_base 7: mod_base = OTHER; note = 2'-O-methylcytidine-3'-phosphate
  modified_base 8: mod_base = OTHER; note = 2'-O-methylcytidine-3'-phosphate
  modified_base 9: mod_base = OTHER; note = 2'-O-methylcytidine-3'-phosphate
  modified_base 10: mod_base = OTHER; note = 2'-O-methylcytidine-3'-phosphate
  modified_base 12: mod_base = OTHER; note = 2'-O-methyluridine-3'-phosphate
  modified_base 13: mod_base = OTHER; note = 2'-O-methyluridine-3'-phosphate
  modified_base 14: mod_base = OTHER; note = 2'-O-methylcytidine-3'-phosphate
  modified_base 15: mod_base = OTHER; note = 2'-O-methylcytidine-3'-phosphate
  modified_base 17: mod_base = OTHER; note = 2'-O-methyluridine-3'-phosphate
  misc_feature 1..19: note = RNA
  misc_feature 20..21: note = DNA
gcatctccccattccatgatt

SEQ ID NO: 924 - DNA, 21 bp, Homo sapiens
  source 1..21: mol_type = unassigned DNA
  modified_base 2: mod_base = OTHER; note = 2'-O-methylcytidine-3'-phosphate
  misc_feature 1..19: note = RNA
  misc_feature 20..21: note = DNA
tcatggaatggggagatgctt

SEQ ID NO: 925 - DNA, 21 bp, Homo sapiens
  source 1..21: mol_type = unassigned DNA
  modified_base 1: mod_base = OTHER; note = 2'-O-methylcytidine-3'-phosphate
  modified_base 3: mod_base = OTHER; note = 2'-O-methyluridine-3'-phosphate
  modified_base 4: mod_base = OTHER; note = 2'-O-methylcytidine-3'-phosphate
  modified_base 5: mod_base = OTHER; note = 2'-O-methyluridine-3'-phosphate
  modified_base 6: mod_base = OTHER; note = 2'-O-methylcytidine-3'-phosphate
  modified_base 7: mod_base = OTHER; note = 2'-O-methylcytidine-3'-phosphate
  modified_base 8: mod_base = OTHER; note = 2'-O-methylcytidine-3'-phosphate
  modified_base 9: mod_base = OTHER; note = 2'-O-methylcytidine-3'-phosphate
  modified_base 11: mod_base = OTHER; note = 2'-O-methyluridine-3'-phosphate
  modified_base 12: mod_base = OTHER; note = 2'-O-methyluridine-3'-phosphate
  modified_base 13: mod_base = OTHER; note = 2'-O-methylcytidine-3'-phosphate
  modified_base 14: mod_base = OTHER; note = 2'-O-methylcytidine-3'-phosphate
  modified_base 16: mod_base = OTHER; note = 2'-O-methyluridine-3'-phosphate
  misc_feature 1..19: note = RNA
  misc_feature 20..21: note = DNA
catctccccattccatgagtt

SEQ ID NO: 926 - DNA, 21 bp, Homo sapiens
  source 1..21: mol_type = unassigned DNA
  modified_base 3: mod_base = OTHER; note = 2'-O-methylcytidine-3'-phosphate
  misc_feature 1..19: note = RNA
  misc_feature 20..21: note = DNA
ctcatggaatggggagatgtt

SEQ ID NO: 927 - DNA, 21 bp, Homo sapiens
  source 1..21: mol_type = unassigned DNA
  modified_base 2: mod_base = OTHER; note = 2'-O-methyluridine-3'-phosphate
  modified_base 3: mod_base = OTHER; note = 2'-O-methylcytidine-3'-phosphate
  modified_base 4: mod_base = OTHER; note = 2'-O-methyluridine-3'-phosphate
  modified_base 5: mod_base = OTHER; note = 2'-O-methylcytidine-3'-phosphate
  modified_base 6: mod_base = OTHER; note = 2'-O-methylcytidine-3'-phosphate
  modified_base 7: mod_base = OTHER; note = 2'-O-methylcytidine-3'-phosphate
  modified_base 8: mod_base = OTHER; note = 2'-O-methylcytidine-3'-phosphate
  modified_base 10: mod_base = OTHER; note = 2'-O-methyluridine-3'-phosphate
  modified_base 11: mod_base = OTHER; note = 2'-O-methyluridine-3'-phosphate
  modified_base 12: mod_base = OTHER; note = 2'-O-methylcytidine-3'-phosphate
  modified_base 13: mod_base = OTHER; note = 2'-O-methylcytidine-3'-phosphate
  modified_base 15: mod_base = OTHER; note = 2'-O-methyluridine-3'-phosphate
  modified_base 19: mod_base = OTHER; note = 2'-O-methylcytidine-3'-phosphate
  misc_feature 1..19: note = RNA
  misc_feature 20..21: note = DNA
atctccccattccatgagctt

SEQ ID NO: 928 - DNA, 21 bp, Homo sapiens
  source 1..21: mol_type = unassigned DNA
  modified_base 4: mod_base = OTHER; note = 2'-O-methylcytidine-3'-phosphate
  misc_feature 1..19: note = RNA
  misc_feature 20..21: note = DNA
gctcatggaatggggagattt

SEQ ID NO: 929 - DNA, 21 bp, Homo sapiens
  source 1..21: mol_type = unassigned DNA
  modified_base 1: mod_base = OTHER; note = 2'-O-methylcytidine-3'-phosphate
  modified_base 2: mod_base = OTHER; note = 2'-O-methyluridine-3'-phosphate
  modified_base 3: mod_base = OTHER; note = 2'-O-methylcytidine-3'-phosphate
  modified_base 4: mod_base = OTHER; note = 2'-O-methylcytidine-3'-phosphate
  modified_base 5: mod_base = OTHER; note = 2'-O-methylcytidine-3'-phosphate
  modified_base 6: mod_base = OTHER; note = 2'-O-methylcytidine-3'-phosphate
  modified_base 8: mod_base = OTHER; note = 2'-O-methyluridine-3'-phosphate
  modified_base 9: mod_base = OTHER; note = 2'-O-methyluridine-3'-phosphate
  modified_base 10: mod_base = OTHER; note = 2'-O-methylcytidine-3'-phosphate
  modified_base 11: mod_base = OTHER; note = 2'-O-methylcytidine-3'-phosphate
  modified_base 13: mod_base = OTHER; note = 2'-O-methyluridine-3'-phosphate
  modified_base 17: mod_base = OTHER; note = 2'-O-methylcytidine-3'-phosphate
  modified_base 19: mod_base = OTHER; note = 2'-O-methyluridine-3'-phosphate
  misc_feature 1..19: note = RNA
  misc_feature 20..21: note = DNA
ctccccattccatgagcattt

SEQ ID NO: 930 - DNA, 21 bp, Homo sapiens
  source 1..21: mol_type = unassigned DNA
  modified_base 6: mod_base = OTHER; note = 2'-O-methylcytidine-3'-phosphate
  misc_feature 1..19: note = RNA
  misc_feature 20..21: note = DNA
atgctcatggaatggggagtt

SEQ ID NO: 931 - DNA, 21 bp, Homo sapiens
  source 1..21: mol_type = unassigned DNA
  modified_base 1: mod_base = OTHER; note = 2'-O-methylcytidine-3'-phosphate
  modified_base 2: mod_base = OTHER; note = 2'-O-methylcytidine-3'-phosphate
  modified_base 3: mod_base = OTHER; note = 2'-O-methylcytidine-3'-phosphate
  modified_base 5: mod_base = OTHER; note = 2'-O-methyluridine-3'-phosphate
  modified_base 6: mod_base = OTHER; note = 2'-O-methyluridine-3'-phosphate
  modified_base 7: mod_base = OTHER; note = 2'-O-methylcytidine-3'-phosphate
  modified_base 8: mod_base = OTHER; note = 2'-O-methylcytidine-3'-phosphate
  modified_base 10: mod_base = OTHER; note = 2'-O-methyluridine-3'-phosphate
  modified_base 14: mod_base = OTHER; note = 2'-O-methylcytidine-3'-phosphate
  modified_base 16: mod_base = OTHER; note = 2'-O-methyluridine-3'-phosphate
  modified_base 18: mod_base = OTHER; note = 2'-O-methylcytidine-3'-phosphate
  misc_feature 1..19: note = RNA
  misc_feature 20..21: note = DNA
cccattccatgagcatgcatt

SEQ ID NO: 932 - DNA, 21 bp, Homo sapiens
  source 1..21: mol_type = unassigned DNA
  modified_base 3: mod_base = OTHER; note = 2'-O-methylcytidine-3'-phosphate
  modified_base 9: mod_base = OTHER; note = 2'-O-methylcytidine-3'-phosphate
  misc_feature 1..19: note = RNA
  misc_feature 20..21: note = DNA
tgcatgctcatggaatgggtt

SEQ ID NO: 933 - DNA, 21 bp, Homo sapiens
  source 1..21: mol_type = unassigned DNA
  modified_base 1: mod_base = OTHER; note = 2'-O-methylcytidine-3'-phosphate
  modified_base 2: mod_base = OTHER; note = 2'-O-methylcytidine-3'-phosphate
  modified_base 4: mod_base = OTHER; note = 2'-O-methyluridine-3'-phosphate
  modified_base 8: mod_base = OTHER; note = 2'-O-methylcytidine-3'-phosphate
  modified_base 10: mod_base = OTHER; note = 2'-O-methyluridine-3'-phosphate
  modified_base 12: mod_base = OTHER; note = 2'-O-methylcytidine-3'-phosphate
  modified_base 18: mod_base = OTHER; note = 2'-O-methyluridine-3'-phosphate
  misc_feature 1..19: note = RNA
  misc_feature 20..21: note = DNA
ccatgagcatgcagaggtgtt

SEQ ID NO: 934 - DNA, 21 bp, Homo sapiens
  source 1..21: mol_type = unassigned DNA
  modified_base 1: mod_base = OTHER; note = 2'-O-methylcytidine-3'-phosphate
  modified_base 9: mod_base = OTHER; note = 2'-O-methylcytidine-3'-phosphate
  modified_base 15: mod_base = OTHER; note = 2'-O-methylcytidine-3'-phosphate
  misc_feature 1..19: note = RNA
  misc_feature 20..21: note = DNA
cacctctgcatgctcatggtt

SEQ ID NO: 935 - DNA, 21 bp, Homo sapiens
  source 1..21: mol_type = unassigned DNA
  modified_base 3: mod_base = OTHER; note = 2'-O-methylcytidine-3'-phosphate
  modified_base 5: mod_base = OTHER; note = 2'-O-methyluridine-3'-phosphate
  modified_base 7: mod_base = OTHER; note = 2'-O-methylcytidine-3'-phosphate
  modified_base 13: mod_base = OTHER; note = 2'-O-methyluridine-3'-phosphate
  modified_base 16: mod_base = OTHER; note = 2'-O-methyluridine-3'-phosphate
  modified_base 18: mod_base = OTHER; note = 2'-O-methyluridine-3'-phosphate
  modified_base 19: mod_base = OTHER; note = 2'-O-methyluridine-3'-phosphate
  misc_feature 1..19: note = RNA
  misc_feature 20..21: note = DNA
agcatgcagaggtggtatttt

SEQ ID NO: 936 - DNA, 21 bp, Homo sapiens
  source 1..21: mol_type = unassigned DNA
  modified_base 3: mod_base = OTHER; note = 2'-O-methyluridine-3'-phosphate
  modified_base 6: mod_base = OTHER; note = 2'-O-methylcytidine-3'-phosphate
  modified_base 14: mod_base = OTHER; note = 2'-O-methylcytidine-3'-phosphate
  misc_feature 1..19: note = RNA
  misc_feature 20..21: note = DNA
aataccacctctgcatgcttt

SEQ ID NO: 937 - DNA, 21 bp, Homo sapiens
  source 1..21: mol_type = unassigned DNA
  modified_base 1: mod_base = OTHER; note = 2'-O-methylcytidine-3'-phosphate
  modified_base 3: mod_base = OTHER; note = 2'-O-methyluridine-3'-phosphate
  modified_base 5: mod_base = OTHER; note = 2'-O-methylcytidine-3'-phosphate
  modified_base 11: mod_base = OTHER; note = 2'-O-methyluridine-3'-phosphate
  modified_base 14: mod_base = OTHER; note = 2'-O-methyluridine-3'-phosphate
  modified_base 16: mod_base = OTHER; note = 2'-O-methyluridine-3'-phosphate
  modified_base 17: mod_base = OTHER; note = 2'-O-methyluridine-3'-phosphate
  modified_base 18: mod_base = OTHER; note = 2'-O-methylcytidine-3'-phosphate
  misc_feature 1..19: note = RNA
  misc_feature 20..21: note = DNA
catgcagaggtggtattcatt

SEQ ID NO: 938 - DNA, 21 bp, Homo sapiens
  source 1..21: mol_type = unassigned DNA
  modified_base 5: mod_base = OTHER; note = 2'-O-methyluridine-3'-phosphate
  modified_base 8: mod_base = OTHER; note = 2'-O-methylcytidine-3'-phosphate
  modified_base 16: mod_base = OTHER; note = 2'-O-methylcytidine-3'-phosphate
  misc_feature 1..19: note = RNA
  misc_feature 20..21: note = DNA
tgaataccacctctgcatgtt

SEQ ID NO: 939 - DNA, 21 bp, Homo sapiens
  source 1..21: mol_type = unassigned DNA
  modified_base 2: mod_base = OTHER; note = 2'-O-methyluridine-3'-phosphate
  modified_base 4: mod_base = OTHER; note = 2'-O-methylcytidine-3'-phosphate
  modified_base 10: mod_base = OTHER; note = 2'-O-methyluridine-3'-phosphate
  modified_base 13: mod_base = OTHER; note = 2'-O-methyluridine-3'-phosphate
  modified_base 15: mod_base = OTHER; note = 2'-O-methyluridine-3'-phosphate
  modified_base 16: mod_base = OTHER; note = 2'-O-methyluridine-3'-phosphate
  modified_base 17: mod_base = OTHER; note = 2'-O-methylcytidine-3'-phosphate
  modified_base 19: mod_base = OTHER; note = 2'-O-methylcytidine-3'-phosphate
  misc_feature 1..19: note = RNA
  misc_feature 20..21: note = DNA
atgcagaggtggtattcactt

SEQ ID NO: 940 - DNA, 21 bp, Homo sapiens
  source 1..21: mol_type = unassigned DNA
  modified_base 6: mod_base = OTHER; note = 2'-O-methyluridine-3'-phosphate
  modified_base 9: mod_base = OTHER; note = 2'-O-methylcytidine-3'-phosphate
  modified_base 17: mod_base = OTHER; note = 2'-O-methylcytidine-3'-phosphate
  misc_feature 1..19: note = RNA
  misc_feature 20..21: note = DNA
gtgaataccacctctgcattt

SEQ ID NO: 941 - DNA, 21 bp, Homo sapiens
  source 1..21: mol_type = unassigned DNA
  modified_base 3: mod_base = OTHER; note = 2'-O-methyluridine-3'-phosphate
  modified_base 6: mod_base = OTHER; note = 2'-O-methyluridine-3'-phosphate
  modified_base 8: mod_base = OTHER; note = 2'-O-methyluridine-3'-phosphate
  modified_base 9: mod_base = OTHER; note = 2'-O-methyluridine-3'-phosphate
  modified_base 10: mod_base = OTHER; note = 2'-O-methylcytidine-3'-phosphate
  modified_base 12: mod_base = OTHER; note = 2'-O-methylcytidine-3'-phosphate
  modified_base 15: mod_base = OTHER; note = 2'-O-methylcytidine-3'-phosphate
  modified_base 16: mod_base = OTHER; note = 2'-O-methylcytidine-3'-phosphate
  modified_base 19: mod_base = OTHER; note = 2'-O-methylcytidine-3'-phosphate
  misc_feature 1..19: note = RNA
  misc_feature 20..21: note = DNA
ggtggtattcacagccaactt

SEQ ID NO: 942 - DNA, 21 bp, Homo sapiens
  source 1..21: mol_type = unassigned DNA
  modified_base 13: mod_base = OTHER; note = 2'-O-methyluridine-3'-phosphate
  modified_base 16: mod_base = OTHER; note = 2'-O-methylcytidine-3'-phosphate
  misc_feature 1..19: note = RNA
  misc_feature 20..21: note = DNA
gttggctgtgaataccacctt

SEQ ID NO: 943 - DNA, 21 bp, Homo sapiens
  source 1..21: mol_type = unassigned DNA
  modified_base 2: mod_base = OTHER; note = 2'-O-methyluridine-3'-phosphate
  modified_base 5: mod_base = OTHER; note = 2'-O-methyluridine-3'-phosphate
  modified_base 7: mod_base = OTHER; note = 2'-O-methyluridine-3'-phosphate
  modified_base 8: mod_base = OTHER; note = 2'-O-methyluridine-3'-phosphate
  modified_base 9: mod_base = OTHER; note = 2'-O-methylcytidine-3'-phosphate
  modified_base 11: mod_base = OTHER; note = 2'-O-methylcytidine-3'-phosphate
  modified_base 14: mod_base = OTHER; note = 2'-O-methylcytidine-3'-phosphate
  modified_base 15: mod_base = OTHER; note = 2'-O-methylcytidine-3'-phosphate
  modified_base 18: mod_base = OTHER; note = 2'-O-methylcytidine-3'-phosphate
  misc_feature 1..19: note = RNA
  misc_feature 20..21: note = DNA
gtggtattcacagccaacgtt

SEQ ID NO: 944 - DNA, 21 bp, Homo sapiens
  source 1..21: mol_type = unassigned DNA
  modified_base 14: mod_base = OTHER; note = 2'-O-methyluridine-3'-phosphate
  modified_base 17: mod_base = OTHER; note = 2'-O-methylcytidine-3'-phosphate
  misc_feature 1..19: note = RNA
  misc_feature 20..21: note = DNA
cgttggctgtgaataccactt

SEQ ID NO: 945 - DNA, 21 bp, Homo sapiens
  source 1..21: mol_type = unassigned DNA
  modified_base 1: mod_base = OTHER; note = 2'-O-methyluridine-3'-phosphate
  modified_base 4: mod_base = OTHER; note = 2'-O-methyluridine-3'-phosphate
  modified_base 6: mod_base = OTHER; note = 2'-O-methyluridine-3'-phosphate
  modified_base 7: mod_base = OTHER; note = 2'-O-methyluridine-3'-phosphate
  modified_base 8: mod_base = OTHER; note = 2'-O-methylcytidine-3'-phosphate
  modified_base 10: mod_base = OTHER; note = 2'-O-methylcytidine-3'-phosphate
  modified_base 13: mod_base = OTHER; note = 2'-O-methylcytidine-3'-phosphate
  modified_base 14: mod_base = OTHER; note = 2'-O-methylcytidine-3'-phosphate
  modified_base 17: mod_base = OTHER; note = 2'-O-methylcytidine-3'-phosphate
  misc_feature 1..19: note = RNA
  misc_feature 20..21: note = DNA
tggtattcacagccaacgatt

SEQ ID NO: 946 - DNA, 21 bp, Homo sapiens
  source 1..21: mol_type = unassigned DNA
  modified_base 15: mod_base = OTHER; note = 2'-O-methyluridine-3'-phosphate
  modified_base 18: mod_base = OTHER; note = 2'-O-methylcytidine-3'-phosphate
  misc_feature 1..19: note = RNA
  misc_feature 20..21: note = DNA
tcgttggctgtgaataccatt

SEQ ID NO: 947 - DNA, 21 bp, Homo sapiens
  source 1..21: mol_type = unassigned DNA
  modified_base 3: mod_base = OTHER; note = 2'-O-methyluridine-3'-phosphate
  modified_base 5: mod_base = OTHER; note = 2'-O-methyluridine-3'-phosphate
  modified_base 6: mod_base = OTHER; note = 2'-O-methyluridine-3'-phosphate
  modified_base 7: mod_base = OTHER; note = 2'-O-methylcytidine-3'-phosphate
  modified_base 9: mod_base = OTHER; note = 2'-O-methylcytidine-3'-phosphate
  modified_base 12: mod_base = OTHER; note = 2'-O-methylcytidine-3'-phosphate
  modified_base 13: mod_base = OTHER; note = 2'-O-methylcytidine-3'-phosphate
  modified_base 16: mod_base = OTHER; note = 2'-O-methylcytidine-3'-phosphate
  modified_base 19: mod_base = OTHER; note = 2'-O-methylcytidine-3'-phosphate
  misc_feature 1..19: note = RNA
  misc_feature 20..21: note = DNA
ggtattcacagccaacgactt

SEQ ID NO: 948 - DNA, 21 bp, Homo sapiens
  source 1..21: mol_type = unassigned DNA
  modified_base 16: mod_base = OTHER; note = 2'-O-methyluridine-3'-phosphate
  misc_feature 1..19: note = RNA
  misc_feature 20..21: note = DNA
gtcgttggctgtgaatacctt

SEQ ID NO: 949 - DNA, 21 bp, Homo sapiens
  source 1..21: mol_type = unassigned DNA
  modified_base 2: mod_base = OTHER; note = 2'-O-methyluridine-3'-phosphate
  modified_base 4: mod_base = OTHER; note = 2'-O-methyluridine-3'-phosphate
  modified_base 5: mod_base = OTHER; note = 2'-O-methyluridine-3'-phosphate
  modified_base 6: mod_base = OTHER; note = 2'-O-methylcytidine-3'-phosphate
  modified_base 8: mod_base = OTHER; note = 2'-O-methylcytidine-3'-phosphate
  modified_base 11: mod_base = OTHER; note = 2'-O-methylcytidine-3'-phosphate
  modified_base 12: mod_base = OTHER; note = 2'-O-methylcytidine-3'-phosphate
  modified_base 15: mod_base = OTHER; note = 2'-O-methylcytidine-3'-phosphate
  modified_base 18: mod_base = OTHER; note = 2'-O-methylcytidine-3'-phosphate
  modified_base 19: mod_base = OTHER; note = 2'-O-methyluridine-3'-phosphate
  misc_feature 1..19: note = RNA
  misc_feature 20..21: note = DNA
gtattcacagccaacgacttt

SEQ ID NO: 950 - DNA, 21 bp, Homo sapiens
  source 1..21: mol_type = unassigned DNA
  modified_base 17: mod_base = OTHER; note = 2'-O-methyluridine-3'-phosphate
  misc_feature 1..19: note = RNA
  misc_feature 20..21: note = DNA
agtcgttggctgtgaatactt

SEQ ID NO: 951 - DNA, 21 bp, Homo sapiens
  source 1..21: mol_type = unassigned DNA
  modified_base 1: mod_base = OTHER; note = 2'-O-methyluridine-3'-phosphate
  modified_base 3: mod_base = OTHER; note = 2'-O-methyluridine-3'-phosphate
  modified_base 4: mod_base = OTHER; note = 2'-O-methyluridine-3'-phosphate
  modified_base 5: mod_base = OTHER; note = 2'-O-methylcytidine-3'-phosphate
  modified_base 7: mod_base = OTHER; note = 2'-O-methylcytidine-3'-phosphate
  modified_base 10: mod_base = OTHER; note = 2'-O-methylcytidine-3'-phosphate
  modified_base 11: mod_base = OTHER; note = 2'-O-methylcytidine-3'-phosphate
  modified_base 14: mod_base = OTHER; note = 2'-O-methylcytidine-3'-phosphate
  modified_base 17: mod_base = OTHER; note = 2'-O-methylcytidine-3'-phosphate
  modified_base 18: mod_base = OTHER; note = 2'-O-methyluridine-3'-phosphate
  modified_base 19: mod_base = OTHER; note = 2'-O-methylcytidine-3'-phosphate
  misc_feature 1..19: note = RNA
  misc_feature 20..21: note = DNA
tattcacagccaacgactctt

SEQ ID NO: 952 - DNA, 21 bp, Homo sapiens
  source 1..21: mol_type = unassigned DNA
  modified_base 18: mod_base = OTHER; note = 2'-O-methyluridine-3'-phosphate
  misc_feature 1..19: note = RNA
  misc_feature 20..21: note = DNA
gagtcgttggctgtgaatatt

SEQ ID NO: 953 - DNA, 21 bp, Homo sapiens
  source 1..21: mol_type = unassigned DNA
  modified_base 1: mod_base = OTHER; note = 2'-O-methyluridine-3'-phosphate
  modified_base 2: mod_base = OTHER; note = 2'-O-methylcytidine-3'-phosphate
  modified_base 4: mod_base = OTHER; note = 2'-O-methylcytidine-3'-phosphate
  modified_base 7: mod_base = OTHER; note = 2'-O-methylcytidine-3'-phosphate
  modified_base 8: mod_base = OTHER; note = 2'-O-methylcytidine-3'-phosphate
  modified_base 11: mod_base = OTHER; note = 2'-O-methylcytidine-3'-phosphate
  modified_base 14: mod_base = OTHER; note = 2'-O-methylcytidine-3'-phosphate
  modified_base 15: mod_base = OTHER; note = 2'-O-methyluridine-3'-phosphate
  modified_base 16: mod_base = OTHER; note = 2'-O-methylcytidine-3'-phosphate
  modified_base 17: mod_base = OTHER; note = 2'-O-methylcytidine-3'-phosphate
  misc_feature 1..19: note = RNA
  misc_feature 20..21: note = DNA
tcacagccaacgactccggtt

SEQ ID NO: 954 - DNA, 21 bp, Homo sapiens
  source 1..21: mol_type = unassigned DNA
  misc_feature 1..19: note = RNA
  misc_feature 20..21: note = DNA
ccggagtcgttggctgtgatt

SEQ ID NO: 955 - DNA, 21 bp, Homo sapiens
  source 1..21: mol_type = unassigned DNA
  modified_base 1: mod_base = OTHER; note = 2'-O-methylcytidine-3'-phosphate
  modified_base 2: mod_base = OTHER; note = 2'-O-methylcytidine-3'-phosphate
  modified_base 3: mod_base = OTHER; note = 2'-O-methylcytidine-3'-phosphate
  modified_base 4: mod_base = OTHER; note = 2'-O-methylcytidine-3'-phosphate
  modified_base 6: mod_base = OTHER; note = 2'-O-methylcytidine-3'-phosphate
  modified_base 7: mod_base = OTHER; note = 2'-O-methylcytidine-3'-phosphate
  modified_base 9: mod_base = OTHER; note = 2'-O-methylcytidine-3'-phosphate
  modified_base 10: mod_base = OTHER; note = 2'-O-methyluridine-3'-phosphate
  modified_base 12: mod_base = OTHER; note = 2'-O-methylcytidine-3'-phosphate
  modified_base 14: mod_base = OTHER; note = 2'-O-methylcytidine-3'-phosphate
  modified_base 15: mod_base = OTHER; note = 2'-O-methylcytidine-3'-phosphate
  modified_base 17: mod_base = OTHER; note = 2'-O-methyluridine-3'-phosphate
  modified_base 18: mod_base = OTHER; note = 2'-O-methyluridine-3'-phosphate
  misc_feature 1..19: note = RNA
  misc_feature 20..21: note = DNA
ccccgccgctacaccattgtt

SEQ ID NO: 956 - DNA, 21 bp, Homo sapiens
  source 1..21: mol_type = unassigned DNA
  modified_base 1: mod_base = OTHER; note = 2'-O-methylcytidine-3'-phosphate
  modified_base 9: mod_base = OTHER; note = 2'-O-methyluridine-3'-phosphate
  misc_feature 1..19: note = RNA
  misc_feature 20..21: note = DNA
caatggtgtagcggcggggtt

SEQ ID NO: 957 - DNA, 21 bp, Homo sapiens
  source 1..21: mol_type = unassigned DNA
  modified_base 5: mod_base = OTHER; note = 2'-O-methyluridine-3'-phosphate
  modified_base 6: mod_base = OTHER; note = 2'-O-methylcytidine-3'-phosphate
  modified_base 7: mod_base = OTHER; note = 2'-O-methylcytidine-3'-phosphate
  modified_base 9: mod_base = OTHER; note = 2'-O-methylcytidine-3'-phosphate
  modified_base 10: mod_base = OTHER; note = 2'-O-methyluridine-3'-phosphate
  modified_base 11: mod_base = OTHER; note = 2'-O-methylcytidine-3'-phosphate
  modified_base 13: mod_base = OTHER; note = 2'-O-methyluridine-3'-phosphate
  modified_base 14: mod_base = OTHER; note = 2'-O-methyluridine-3'-phosphate
  modified_base 15: mod_base = OTHER; note = 2'-O-methylcytidine-3'-phosphate
  modified_base 16: mod_base = OTHER; note = 2'-O-methyluridine-3'-phosphate
  modified_base 17: mod_base = OTHER; note = 2'-O-methyluridine-3'-phosphate
  misc_feature 1..19: note = RNA
  misc_feature 20..21: note = DNA
gaagtccactcattcttggtt

SEQ ID NO: 958 - DNA, 21 bp, Homo sapiens
  source 1..21: mol_type = unassigned DNA
  modified_base 2: mod_base = OTHER; note = 2'-O-methylcytidine-3'-phosphate
  misc_feature 1..19: note = RNA
  misc_feature 20..21: note = DNA
ccaagaatgagtggacttctt

SEQ ID NO: 959 - DNA, 21 bp, Homo sapiens
  source 1..21: mol_type = unassigned DNA
  modified_base 1: mod_base = OTHER; note = 2'-O-methylcytidine-3'-phosphate
  modified_base 2: mod_base = OTHER; note = 2'-O-methylcytidine-3'-phosphate
  modified_base 3: mod_base = OTHER; note = 2'-O-methylcytidine-3'-phosphate
  modified_base 4: mod_base = OTHER; note = 2'-O-methyluridine-3'-phosphate
  modified_base 6: mod_base = OTHER; note = 2'-O-methylcytidine-3'-phosphate
  modified_base 7: mod_base = OTHER; note = 2'-O-methyluridine-3'-phosphate
  modified_base 11: mod_base = OTHER; note = 2'-O-methylcytidine-3'-phosphate
  modified_base 12: mod_base = OTHER; note = 2'-O-methylcytidine-3'-phosphate
  modified_base 13: mod_base = OTHER; note = 2'-O-methylcytidine-3'-phosphate
  modified_base 14: mod_base = OTHER; note = 2'-O-methylcytidine-3'-phosphate
  modified_base 15: mod_base = OTHER; note = 2'-O-methyluridine-3'-phosphate
  modified_base 17: mod_base = OTHER; note = 2'-O-methylcytidine-3'-phosphate
  modified_base 18: mod_base = OTHER; note = 2'-O-methyluridine-3'-phosphate
  modified_base 19: mod_base = OTHER; note = 2'-O-methylcytidine-3'-phosphate
  misc_feature 1..19: note = RNA
  misc_feature 20..21: note = DNA
ccctgctgagcccctactctt

SEQ ID NO: 960 - DNA, 21 bp, Homo sapiens
  source 1..21: mol_type = unassigned DNA
  modified_base 4: mod_base = OTHER; note = 2'-O-methyluridine-3'-phosphate
  modified_base 12: mod_base = OTHER; note = 2'-O-methylcytidine-3'-phosphate
  modified_base 15: mod_base = OTHER; note = 2'-O-methylcytidine-3'-phosphate
  misc_feature 1..19: note = RNA
  misc_feature 20..21: note = DNA
gagtaggggctcagcagggtt

SEQ ID NO: 961 - DNA, 21 bp, Homo sapiens
  source 1..21: mol_type = unassigned DNA
  modified_base 1: mod_base = OTHER; note = 2'-O-methylcytidine-3'-phosphate
  modified_base 2: mod_base = OTHER; note = 2'-O-methyluridine-3'-phosphate
  modified_base 6: mod_base = OTHER; note = 2'-O-methylcytidine-3'-phosphate
  modified_base 7: mod_base = OTHER; note = 2'-O-methylcytidine-3'-phosphate
  modified_base 8: mod_base = OTHER; note = 2'-O-methylcytidine-3'-phosphate
  modified_base 9: mod_base = OTHER; note = 2'-O-methylcytidine-3'-phosphate
  modified_base 10: mod_base = OTHER; note = 2'-O-methyluridine-3'-phosphate
  modified_base 12: mod_base = OTHER; note = 2'-O-methylcytidine-3'-phosphate
  modified_base 13: mod_base = OTHER; note = 2'-O-methyluridine-3'-phosphate
  modified_base 14: mod_base = OTHER; note = 2'-O-methylcytidine-3'-phosphate
  modified_base 15: mod_base = OTHER; note = 2'-O-methylcytidine-3'-phosphate
  modified_base 16: mod_base = OTHER; note = 2'-O-methyluridine-3'-phosphate
  modified_base 18: mod_base = OTHER; note = 2'-O-methyluridine-3'-phosphate
  modified_base 19: mod_base = OTHER; note = 2'-O-methyluridine-3'-phosphate
  misc_feature 1..19: note = RNA
  misc_feature 20..21: note = DNA
ctgagcccctactcctatttt

SEQ ID NO: 962 - DNA, 21 bp, Homo sapiens
  source 1..21: mol_type = unassigned DNA
  modified_base 3: mod_base = OTHER; note = 2'-O-methyluridine-3'-phosphate
  modified_base 9: mod_base = OTHER; note = 2'-O-methyluridine-3'-phosphate
  modified_base 17: mod_base = OTHER; note = 2'-O-methylcytidine-3'-phosphate
  misc_feature 1..19: note = RNA
  misc_feature 20..21: note = DNA
aataggagtaggggctcagtt

SEQ ID NO: 963 - DNA, 21 bp, Homo sapiens
  source 1..21: mol_type = unassigned DNA
  modified_base 1: mod_base = OTHER; note = 2'-O-methyluridine-3'-phosphate
  modified_base 5: mod_base = OTHER; note = 2'-O-methylcytidine-3'-phosphate
  modified_base 6: mod_base = OTHER; note = 2'-O-methylcytidine-3'-phosphate
  modified_base 7: mod_base = OTHER; note = 2'-O-methylcytidine-3'-phosphate
  modified_base 8: mod_base = OTHER; note = 2'-O-methylcytidine-3'-phosphate
  modified_base 9: mod_base = OTHER; note = 2'-O-methyluridine-3'-phosphate
  modified_base 11: mod_base = OTHER; note = 2'-O-methylcytidine-3'-phosphate
  modified_base 12: mod_base = OTHER; note = 2'-O-methyluridine-3'-phosphate
  modified_base 13: mod_base = OTHER; note = 2'-O-methylcytidine-3'-phosphate
  modified_base 14: mod_base = OTHER; note = 2'-O-methylcytidine-3'-phosphate
  modified_base 15: mod_base = OTHER; note = 2'-O-methyluridine-3'-phosphate
  modified_base 17: mod_base = OTHER; note = 2'-O-methyluridine-3'-phosphate
  modified_base 18: mod_base = OTHER; note = 2'-O-methyluridine-3'-phosphate
  modified_base 19: mod_base = OTHER; note = 2'-O-methylcytidine-3'-phosphate
  misc_feature 1..19: note = RNA
  misc_feature 20..21: note = DNA
tgagcccctactcctattctt

SEQ ID NO: 964 - DNA, 21 bp, Homo sapiens
  source 1..21: mol_type = unassigned DNA
  modified_base 4: mod_base = OTHER; note = 2'-O-methyluridine-3'-phosphate
  modified_base 10: mod_base = OTHER; note = 2'-O-methyluridine-3'-phosphate
  modified_base 18: mod_base = OTHER; note = 2'-O-methylcytidine-3'-phosphate
  misc_feature 1..19: note = RNA
  misc_feature 20..21: note = DNA
gaataggagtaggggctcatt

SEQ ID NO: 965 - DNA, 21 bp, Homo sapiens
  source 1..21: mol_type = unassigned DNA
  modified_base 1: mod_base = OTHER; note = 2'-O-methylcytidine-3'-phosphate
  modified_base 2: mod_base = OTHER; note = 2'-O-methylcytidine-3'-phosphate
  modified_base 3: mod_base = OTHER; note = 2'-O-methylcytidine-3'-phosphate
  modified_base 4: mod_base = OTHER; note = 2'-O-methylcytidine-3'-phosphate
  modified_base 5: mod_base = OTHER; note = 2'-O-methyluridine-3'-phosphate
  modified_base 7: mod_base = OTHER; note = 2'-O-methylcytidine-3'-phosphate
  modified_base 8: mod_base = OTHER; note = 2'-O-methyluridine-3'-phosphate
  modified_base 9: mod_base = OTHER; note = 2'-O-methylcytidine-3'-phosphate
  modified_base 10: mod_base = OTHER; note = 2'-O-methylcytidine-3'-phosphate
  modified_base 11: mod_base = OTHER; note = 2'-O-methyluridine-3'-phosphate
  modified_base 13: mod_base = OTHER; note = 2'-O-methyluridine-3'-phosphate
  modified_base 14: mod_base = OTHER; note = 2'-O-methyluridine-3'-phosphate
  modified_base 15: mod_base = OTHER; note = 2'-O-methylcytidine-3'-phosphate
  modified_base 16: mod_base = OTHER; note = 2'-O-methylcytidine-3'-phosphate
  modified_base 18: mod_base = OTHER; note = 2'-O-methylcytidine-3'-phosphate
  modified_base 19: mod_base = OTHER; note = 2'-O-methylcytidine-3'-phosphate
  misc_feature 1..19: note = RNA
  misc_feature 20..21: note = DNA
cccctactcctattccacctt

SEQ ID NO: 966 - DNA, 21 bp, Homo sapiens
  source 1..21: mol_type = unassigned DNA
  modified_base 8: mod_base = OTHER; note = 2'-O-methyluridine-3'-phosphate
  modified_base 14: mod_base = OTHER; note = 2'-O-methyluridine-3'-phosphate
  misc_feature 1..19: note = RNA
  misc_feature 20..21: note = DNA
ggtggaataggagtaggggtt

SEQ ID NO: 967 - DNA, 21 bp, Homo sapiens
  source 1..21: mol_type = unassigned DNA
  modified_base 1: mod_base = OTHER; note = 2'-O-methylcytidine-3'-phosphate
  modified_base 2: mod_base = OTHER; note = 2'-O-methyluridine-3'-phosphate
  modified_base 4: mod_base = OTHER; note = 2'-O-methylcytidine-3'-phosphate
  modified_base 5: mod_base = OTHER; note = 2'-O-methyluridine-3'-phosphate
  modified_base 6: mod_base = OTHER; note = 2'-O-methylcytidine-3'-phosphate
  modified_base 7: mod_base = OTHER; note = 2'-O-methylcytidine-3'-phosphate
  modified_base 8: mod_base = OTHER; note = 2'-O-methyluridine-3'-phosphate
  modified_base 10: mod_base = OTHER; note = 2'-O-methyluridine-3'-phosphate
  modified_base 11: mod_base = OTHER; note = 2'-O-methyluridine-3'-phosphate
  modified_base 12: mod_base = OTHER; note = 2'-O-methylcytidine-3'-phosphate
  modified_base 13: mod_base = OTHER; note = 2'-O-methylcytidine-3'-phosphate
  modified_base 15: mod_base = OTHER; note = 2'-O-methylcytidine-3'-phosphate
  modified_base 16: mod_base = OTHER; note = 2'-O-methylcytidine-3'-phosphate
  modified_base 18: mod_base = OTHER; note = 2'-O-methylcytidine-3'-phosphate
  misc_feature 1..19: note = RNA
  misc_feature 20..21: note = DNA
ctactcctattccaccacgtt

SEQ ID NO: 968 - DNA, 21 bp, Homo sapiens
  source 1..21: mol_type = unassigned DNA
  modified_base 11: mod_base = OTHER; note = 2'-O-methyluridine-3'-phosphate
  modified_base 17: mod_base = OTHER; note = 2'-O-methyluridine-3'-phosphate
  misc_feature 1..19: note = RNA
  misc_feature 20..21: note = DNA
cgtggtggaataggagtagtt

SEQ ID NO: 969 - DNA, 21 bp, Homo sapiens
  source 1..21: mol_type = unassigned DNA
  modified_base 1: mod_base = OTHER; note = 2'-O-methyluridine-3'-phosphate
  modified_base 3: mod_base = OTHER; note = 2'-O-methylcytidine-3'-phosphate
  modified_base 4: mod_base = OTHER; note = 2'-O-methyluridine-3'-phosphate
  modified_base 5: mod_base = OTHER; note = 2'-O-methylcytidine-3'-phosphate
  modified_base 6: mod_base = OTHER; note = 2'-O-methylcytidine-3'-phosphate
  modified_base 7: mod_base = OTHER; note = 2'-O-methyluridine-3'-phosphate
  modified_base 9: mod_base = OTHER; note = 2'-O-methyluridine-3'-phosphate
  modified_base 10: mod_base = OTHER; note = 2'-O-methyluridine-3'-phosphate
  modified_base 11: mod_base = OTHER; note = 2'-O-methylcytidine-3'-phosphate
  modified_base 12: mod_base = OTHER; note = 2'-O-methylcytidine-3'-phosphate
  modified_base 14: mod_base = OTHER; note = 2'-O-methylcytidine-3'-phosphate
  modified_base 15: mod_base = OTHER; note = 2'-O-methylcytidine-3'-phosphate
  modified_base 17: mod_base = OTHER; note = 2'-O-methylcytidine-3'-phosphate
  misc_feature 1..19: note = RNA
  misc_feature 20..21: note = DNA
tactcctattccaccacggtt

SEQ ID NO: 970 - DNA, 21 bp, Homo sapiens
  source 1..21: mol_type = unassigned DNA
  modified_base 12: mod_base = OTHER; note = 2'-O-methyluridine-3'-phosphate
  modified_base 18: mod_base = OTHER; note = 2'-O-methyluridine-3'-phosphate
  misc_feature 1..19: note = RNA
  misc_feature 20..21: note = DNA
ccgtggtggaataggagtatt

SEQ ID NO: 971 - DNA, 21 bp, Homo sapiens
  source 1..21: mol_type = unassigned DNA
  modified_base 2: mod_base = OTHER; note = 2'-O-methylcytidine-3'-phosphate
  modified_base 3: mod_base = OTHER; note = 2'-O-methyluridine-3'-phosphate
  modified_base 4: mod_base = OTHER; note = 2'-O-methylcytidine-3'-phosphate
  modified_base 5: mod_base = OTHER; note = 2'-O-methylcytidine-3'-phosphate
  modified_base 6: mod_base = OTHER; note = 2'-O-methyluridine-3'-phosphate
  modified_base 8: mod_base = OTHER; note = 2'-O-methyluridine-3'-phosphate
  modified_base 9: mod_base = OTHER; note = 2'-O-methyluridine-3'-phosphate
  modified_base 10: mod_base = OTHER; note = 2'-O-methylcytidine-3'-phosphate
  modified_base 11: mod_base = OTHER; note = 2'-O-methylcytidine-3'-phosphate
  modified_base 13: mod_base = OTHER; note = 2'-O-methylcytidine-3'-phosphate
  modified_base 14: mod_base = OTHER; note = 2'-O-methylcytidine-3'-phosphate
  modified_base 16: mod_base = OTHER; note = 2'-O-methylcytidine-3'-phosphate
  modified_base 19: mod_base = OTHER; note = 2'-O-methylcytidine-3'-phosphate
  misc_feature 1..19: note = RNA
  misc_feature 20..21: note = DNA
actcctattccaccacggctt

SEQ ID NO: 972 - DNA, 21 bp, Homo sapiens
  source 1..21: mol_type = unassigned DNA
  modified_base 13: mod_base = OTHER; note = 2'-O-methyluridine-3'-phosphate
  misc_feature 1..19: note = RNA
  misc_feature 20..21: note = DNA
gccgtggtggaataggagttt

SEQ ID NO: 973 - DNA, 21 bp, Homo sapiens
  source 1..21: mol_type = unassigned DNA
  modified_base 1: mod_base = OTHER; note = 2'-O-methyluridine-3'-phosphate
  modified_base 2: mod_base = OTHER; note = 2'-O-methylcytidine-3'-phosphate
  modified_base 3: mod_base = OTHER; note = 2'-O-methylcytidine-3'-phosphate
  modified_base 4: mod_base = OTHER; note = 2'-O-methyluridine-3'-phosphate
  modified_base 6: mod_base = OTHER; note = 2'-O-methyluridine-3'-phosphate
  modified_base 7: mod_base = OTHER; note = 2'-O-methyluridine-3'-phosphate
  modified_base 8: mod_base = OTHER; note = 2'-O-methylcytidine-3'-phosphate
  modified_base 9: mod_base = OTHER; note = 2'-O-methylcytidine-3'-phosphate
  modified_base 11: mod_base = OTHER; note = 2'-O-methylcytidine-3'-phosphate
  modified_base 12: mod_base = OTHER; note = 2'-O-methylcytidine-3'-phosphate
  modified_base 14: mod_base = OTHER; note = 2'-O-methylcytidine-3'-phosphate
  modified_base 17: mod_base = OTHER; note = 2'-O-methylcytidine-3'-phosphate
  modified_base 18: mod_base = OTHER; note = 2'-O-methyluridine-3'-phosphate
  misc_feature 1..19: note = RNA
  misc_feature 20..21: note = DNA
tcctattccaccacggctgtt

SEQ ID NO: 974 - DNA, 21 bp, Homo sapiens
  source 1..21: mol_type = unassigned DNA
  modified_base 1: mod_base = OTHER; note = 2'-O-methylcytidine-3'-phosphate
  modified_base 15: mod_base = OTHER; note = 2'-O-methyluridine-3'-phosphate
  misc_feature 1..19: note = RNA
  misc_feature 20..21: note = DNA
cagccgtggtggaataggatt

SEQ ID NO: 975 - DNA, 21 bp, Homo sapiens
  source 1..21: mol_type = unassigned DNA
  modified_base 1: mod_base = OTHER; note = 2'-O-methyluridine-3'-phosphate
  modified_base 3: mod_base = OTHER; note = 2'-O-methyluridine-3'-phosphate
  modified_base 4: mod_base = OTHER; note = 2'-O-methyluridine-3'-phosphate
  modified_base 5: mod_base = OTHER; note = 2'-O-methylcytidine-3'-phosphate
  modified_base 6: mod_base = OTHER; note = 2'-O-methylcytidine-3'-phosphate
  modified_base 8: mod_base = OTHER; note = 2'-O-methylcytidine-3'-phosphate
  modified_base 9: mod_base = OTHER; note = 2'-O-methylcytidine-3'-phosphate
  modified_base 11: mod_base = OTHER; note = 2'-O-methylcytidine-3'-phosphate
  modified_base 14: mod_base = OTHER; note = 2'-O-methylcytidine-3'-phosphate
  modified_base 15: mod_base = OTHER; note = 2'-O-methyluridine-3'-phosphate
  modified_base 17: mod_base = OTHER; note = 2'-O-methyluridine-3'-phosphate
  modified_base 18: mod_base = OTHER; note = 2'-O-methylcytidine-3'-phosphate
  misc_feature 1..19: note = RNA
  misc_feature 20..21: note = DNA
tattccaccacggctgtcgtt

SEQ ID NO: 976 - DNA, 21 bp, Homo sapiens
  source 1..21: mol_type = unassigned DNA
  modified_base 4: mod_base = OTHER; note = 2'-O-methylcytidine-3'-phosphate
  modified_base 18: mod_base = OTHER; note = 2'-O-methyluridine-3'-phosphate
  misc_feature 1..19: note = RNA
  misc_feature 20..21: note = DNA
cgacagccgtggtggaatatt

SEQ ID NO: 977 - DNA, 21 bp, Homo sapiens
  source 1..21: mol_type = unassigned DNA
  modified_base 2: mod_base = OTHER; note = 2'-O-methyluridine-3'-phosphate
  modified_base 3: mod_base = OTHER; note = 2'-O-methyluridine-3'-phosphate
  modified_base 4: mod_base = OTHER; note = 2'-O-methylcytidine-3'-phosphate
  modified_base 5: mod_base = OTHER; note = 2'-O-methylcytidine-3'-phosphate
  modified_base 7: mod_base = OTHER; note = 2'-O-methylcytidine-3'-phosphate
  modified_base 8: mod_base = OTHER; note = 2'-O-methylcytidine-3'-phosphate
  modified_base 10: mod_base = OTHER; note = 2'-O-methylcytidine-3'-phosphate
  modified_base 13: mod_base = OTHER; note = 2'-O-methylcytidine-3'-phosphate
  modified_base 14: mod_base = OTHER; note = 2'-O-methyluridine-3'-phosphate
  modified_base 16: mod_base = OTHER; note = 2'-O-methyluridine-3'-phosphate
  modified_base 17: mod_base = OTHER; note = 2'-O-methylcytidine-3'-phosphate
  modified_base 19: mod_base = OTHER; note = 2'-O-methyluridine-3'-phosphate
  misc_feature 1..19: note = RNA
  misc_feature 20..21: note = DNA
attccaccacggctgtcgttt

SEQ ID NO: 978 - DNA, 21 bp, Homo sapiens
  source 1..21: mol_type = unassigned DNA
  modified_base 5: mod_base = OTHER; note = 2'-O-methylcytidine-3'-phosphate
  misc_feature 1..19: note = RNA
  misc_feature 20..21: note = DNA
acgacagccgtggtggaattt

SEQ ID NO: 979 - DNA, 21 bp, Homo sapiens
  source 1..21: mol_type = unassigned DNA
  modified_base 1: mod_base = OTHER; note = 2'-O-methylcytidine-3'-phosphate
  modified_base 3: mod_base = OTHER; note = 2'-O-methylcytidine-3'-phosphate
  modified_base 4: mod_base = OTHER; note = 2'-O-methylcytidine-3'-phosphate
  modified_base 6: mod_base = OTHER; note = 2'-O-methylcytidine-3'-phosphate
  modified_base 9: mod_base = OTHER; note = 2'-O-methylcytidine-3'-phosphate
  modified_base 10: mod_base = OTHER; note = 2'-O-methyluridine-3'-phosphate
  modified_base 12: mod_base = OTHER; note = 2'-O-methyluridine-3'-phosphate
  modified_base 13: mod_base = OTHER; note = 2'-O-methylcytidine-3'-phosphate
  modified_base 15: mod_base = OTHER; note = 2'-O-methyluridine-3'-phosphate
  modified_base 16: mod_base = OTHER; note = 2'-O-methylcytidine-3'-phosphate
  modified_base 18: mod_base = OTHER; note = 2'-O-methylcytidine-3'-phosphate
  modified_base 19: mod_base = OTHER; note = 2'-O-methylcytidine-3'-phosphate
  misc_feature 1..19: note = RNA
  misc_feature 20..21: note = DNA
caccacggctgtcgtcacctt

SEQ ID NO: 980 - DNA, 21 bp, Homo sapiens
  source 1..21: mol_type = unassigned DNA
  modified_base 9: mod_base = OTHER; note = 2'-O-methylcytidine-3'-phosphate
  misc_feature 1..19: note = RNA
  misc_feature 20..21: note = DNA
ggtgacgacagccgtggtgtt

SEQ ID NO: 981 - DNA, 21 bp, Homo sapiens
  source 1..21: mol_type = unassigned DNA
  modified_base 2: mod_base = OTHER; note = 2'-O-methylcytidine-3'-phosphate
  modified_base 3: mod_base = OTHER; note = 2'-O-methylcytidine-3'-phosphate
  modified_base 5: mod_base = OTHER; note = 2'-O-methylcytidine-3'-phosphate
  modified_base 8: mod_base = OTHER; note = 2'-O-methylcytidine-3'-phosphate
  modified_base 9: mod_base = OTHER; note = 2'-O-methyluridine-3'-phosphate
  modified_base 11: mod_base = OTHER; note = 2'-O-methyluridine-3'-phosphate
  modified_base 12: mod_base = OTHER; note = 2'-O-methylcytidine-3'-phosphate
  modified_base 14: mod_base = OTHER; note = 2'-O-methyluridine-3'-phosphate
  modified_base 15: mod_base = OTHER; note = 2'-O-methylcytidine-3'-phosphate
  modified_base 17: mod_base = OTHER; note = 2'-O-methylcytidine-3'-phosphate
  modified_base 18: mod_base = OTHER; note = 2'-O-methylcytidine-3'-phosphate
  misc_feature 1..19: note = RNA
  misc_feature 20..21: note = DNA
accacggctgtcgtcaccatt

SEQ ID NO: 982 - DNA, 21 bp, Homo sapiens
  source 1..21: mol_type = unassigned DNA
  modified_base 10: mod_base = OTHER; note = 2'-O-methylcytidine-3'-phosphate
  misc_feature 1..19: note = RNA
  misc_feature 20..21: note = DNA
tggtgacgacagccgtggttt

SEQ ID NO: 983 - DNA, 21 bp, Homo sapiens
  source 1..21: mol_type = unassigned DNA
  modified_base 1: mod_base = OTHER; note = 2'-O-methylcytidine-3'-phosphate
  modified_base 2: mod_base = OTHER; note = 2'-O-methylcytidine-3'-phosphate
  modified_base 4: mod_base = OTHER; note = 2'-O-methylcytidine-3'-phosphate
  modified_base 7: mod_base = OTHER; note = 2'-O-methylcytidine-3'-phosphate
  modified_base 8: mod_base = OTHER; note = 2'-O-methyluridine-3'-phosphate
  modified_base 10: mod_base = OTHER; note = 2'-O-methyluridine-3'-phosphate
  modified_base 11: mod_base = OTHER; note = 2'-O-methylcytidine-3'-phosphate
  modified_base 13: mod_base = OTHER; note = 2'-O-methyluridine-3'-phosphate
  modified_base 14: mod_base = OTHER; note = 2'-O-methylcytidine-3'-phosphate
  modified_base 16: mod_base = OTHER; note = 2'-O-methylcytidine-3'-phosphate
  modified_base 17: mod_base = OTHER; note = 2'-O-methylcytidine-3'-phosphate
  misc_feature 1..19: note = RNA
  misc_feature 20..21: note = DNA
ccacggctgtcgtcaccaatt

SEQ ID NO: 984 - DNA, 21 bp, Homo sapiens
  source 1..21: mol_type = unassigned DNA
  modified_base 11: mod_base = OTHER; note = 2'-O-methylcytidine-3'-phosphate
  misc_feature 1..19: note = RNA
  misc_feature 20..21: note = DNA
ttggtgacgacagccgtggtt

SEQ ID NO: 985 - DNA, 21 bp, Homo sapiens
  source 1..21: mol_type = unassigned DNA
  modified_base 2: mod_base = OTHER; note = 2'-O-methylcytidine-3'-phosphate
  modified_base 5: mod_base = OTHER; note = 2'-O-methylcytidine-3'-phosphate
  modified_base 6: mod_base = OTHER; note = 2'-O-methyluridine-3'-phosphate
  modified_base 8: mod_base = OTHER; note = 2'-O-methyluridine-3'-phosphate
  modified_base 9: mod_base = OTHER; note = 2'-O-methylcytidine-3'-phosphate
  modified_base 11: mod_base = OTHER; note = 2'-O-methyluridine-3'-phosphate
  modified_base 12: mod_base = OTHER; note = 2'-O-methylcytidine-3'-phosphate
  modified_base 14: mod_base = OTHER; note = 2'-O-methylcytidine-3'-phosphate
  modified_base 15: mod_base = OTHER; note = 2'-O-methylcytidine-3'-phosphate
  modified_base 18: mod_base = OTHER; note = 2'-O-methyluridine-3'-phosphate
  modified_base 19: mod_base = OTHER; note = 2'-O-methylcytidine-3'-phosphate
  misc_feature 1..19: note = RNA
  misc_feature 20..21: note = DNA
acggctgtcgtcaccaatctt

SEQ ID NO: 986 - DNA, 21 bp, Homo sapiens
  source 1..21: mol_type = unassigned DNA
  modified_base 13: mod_base = OTHER; note = 2'-O-methylcytidine-3'-phosphate
  misc_feature 1..19: note = RNA
  misc_feature 20..21: note = DNA
gattggtgacgacagccgttt

SEQ ID NO: 987 - DNA, 21 bp, Homo sapiens
  source 1..21: mol_type = unassigned DNA
  modified_base 1: mod_base = OTHER; note = 2'-O-methylcytidine-3'-phosphate
  modified_base 4: mod_base = OTHER; note = 2'-O-methylcytidine-3'-phosphate
  modified_base 5: mod_base = OTHER; note = 2'-O-methyluridine-3'-phosphate
  modified_base 7: mod_base = OTHER; note = 2'-O-methyluridine-3'-phosphate
  modified_base 8: mod_base = OTHER; note = 2'-O-methylcytidine-3'-phosphate
  modified_base 10: mod_base = OTHER; note = 2'-O-methyluridine-3'-phosphate
  modified_base 11: mod_base = OTHER; note = 2'-O-methylcytidine-3'-phosphate
  modified_base 13: mod_base = OTHER; note = 2'-O-methylcytidine-3'-phosphate
  modified_base 14: mod_base = OTHER; note = 2'-O-methylcytidine-3'-phosphate
  modified_base 17: mod_base = OTHER; note = 2'-O-methyluridine-3'-phosphate
  modified_base 18: mod_base = OTHER; note = 2'-O-methylcytidine-3'-phosphate
  modified_base 19: mod_base = OTHER; note = 2'-O-methylcytidine-3'-phosphate
  misc_feature 1..19: note = RNA
  misc_feature 20..21: note = DNA
cggctgtcgtcaccaatcctt

SEQ ID NO: 988 - DNA, 21 bp, Homo sapiens
  source 1..21: mol_type = unassigned DNA
  modified_base 14: mod_base = OTHER; note = 2'-O-methylcytidine-3'-phosphate
  misc_feature 1..19: note = RNA
  misc_feature 20..21: note = DNA
ggattggtgacgacagccgtt

SEQ ID NO: 989 - DNA, 21 bp, Homo sapiens
  source 1..21: mol_type = unassigned DNA
  modified_base 1: mod_base = OTHER; note = 2'-O-methylcytidine-3'-phosphate
  modified_base 3: mod_base = OTHER; note = 2'-O-methyluridine-3'-phosphate
  modified_base 4: mod_base = OTHER; note = 2'-O-methylcytidine-3'-phosphate
  modified_base 6: mod_base = OTHER; note = 2'-O-methylcytidine-3'-phosphate
  modified_base 7: mod_base = OTHER; note = 2'-O-methylcytidine-3'-phosphate
  modified_base 10: mod_base = OTHER; note = 2'-O-methyluridine-3'-phosphate
  modified_base 11: mod_base = OTHER; note = 2'-O-methylcytidine-3'-phosphate
  modified_base 12: mod_base = OTHER; note = 2'-O-methylcytidine-3'-phosphate
  modified_base 13: mod_base = OTHER; note = 2'-O-methylcytidine-3'-phosphate
  misc_feature 1..19: note = RNA
  misc_feature 20..21: note = DNA
cgtcaccaatcccaaggaatt

SEQ ID NO: 990 - DNA, 21 bp, Homo sapiens
  source 1..21: mol_type = unassigned DNA
  misc_feature 1..19: note = RNA
  misc_feature 20..21: note = DNA
ttccttgggattggtgacgtt

SEQ ID NO: 991 - DNA, 21 bp, Homo sapiens
  source 1..21: mol_type = unassigned DNA
  modified_base 1: mod_base = OTHER; note = 2'-O-methylcytidine-3'-phosphate
  modified_base 4: mod_base = OTHER; note = 2'-O-methyluridine-3'-phosphate
  modified_base 5: mod_base = OTHER; note = 2'-O-methylcytidine-3'-phosphate
  modified_base 6: mod_base = OTHER; note = 2'-O-methylcytidine-3'-phosphate
  modified_base 7: mod_base = OTHER; note = 2'-O-methylcytidine-3'-phosphate
  modified_base 14: mod_base = OTHER; note = 2'-O-methyluridine-3'-phosphate
  misc_feature 1..19: note = RNA
  misc_feature 20..21: note = DNA
caatcccaaggaatgagggtt

SEQ ID NO: 992 - DNA, 21 bp, Homo sapiens
  source 1..21: mol_type = unassigned DNA
  modified_base 5: mod_base = OTHER; note = 2'-O-methylcytidine-3'-phosphate
  misc_feature 1..19: note = RNA
  misc_feature 20..21: note = DNA
ccctcattccttgggattgtt

SEQ ID NO: 993 - DNA, 21 bp, Homo sapiens
  source 1..21: mol_type = unassigned DNA
  modified_base 1: mod_base = OTHER; note = 2'-O-methylcytidine-3'-phosphate
  modified_base 2: mod_base = OTHER; note = 2'-O-methylcytidine-3'-phosphate
  modified_base 3: mod_base = OTHER; note = 2'-O-methyluridine-3'-phosphate
  modified_base 10: mod_base = OTHER; note = 2'-O-methylcytidine-3'-phosphate
  modified_base 17: mod_base = OTHER; note = 2'-O-methyluridine-3'-phosphate
  misc_feature 1..19: note = RNA
  misc_feature 20..21: note = DNA
cctgaaggacgagggatggtt

SEQ ID NO: 994 - DNA, 21 bp, Homo sapiens
  source 1..21: mol_type = unassigned DNA
  modified_base 2: mod_base = OTHER; note = 2'-O-methylcytidine-3'-phosphate
  modified_base 16: mod_base = OTHER; note = 2'-O-methylcytidine-3'-phosphate
  misc_feature 1..19: note = RNA
  misc_feature 20..21: note = DNA
ccatccctcgtccttcaggtt

SEQ ID NO: 995 - DNA, 21 bp, Homo sapiens
  source 1..21: mol_type = unassigned DNA
  modified_base 4: mod_base = OTHER; note = 2'-O-methylcytidine-3'-phosphate
  modified_base 11: mod_base = OTHER; note = 2'-O-methyluridine-3'-phosphate
  modified_base 16: mod_base = OTHER; note = 2'-O-methyluridine-3'-phosphate
  modified_base 17: mod_base = OTHER; note = 2'-O-methyluridine-3'-phosphate
  modified_base 18: mod_base = OTHER; note = 2'-O-methyluridine-3'-phosphate
  modified_base 19: mod_base = OTHER; note = 2'-O-methylcytidine-3'-phosphate
  misc_feature 1..19: note = RNA
  misc_feature 20..21: note = DNA
ggacgagggatgggatttctt

SEQ ID NO: 996 - DNA, 21 bp, Homo sapiens
  source 1..21: mol_type = unassigned DNA
  modified_base 8: mod_base = OTHER; note = 2'-O-methylcytidine-3'-phosphate
  misc_feature 1..19: note = RNA
  misc_feature 20..21: note = DNA
gaaatcccatccctcgtcctt

SEQ ID NO: 997 - DNA, 21 bp, Homo sapiens
  source 1..21: mol_type = unassigned DNA
  modified_base 4: mod_base = OTHER; note = 2'-O-methyluridine-3'-phosphate
  modified_base 5: mod_base = OTHER; note = 2'-O-methylcytidine-3'-phosphate
  modified_base 6: mod_base = OTHER; note = 2'-O-methylcytidine-3'-phosphate
  modified_base 8: mod_base = OTHER; note = 2'-O-methylcytidine-3'-phosphate
  modified_base 9: mod_base = OTHER; note = 2'-O-methyluridine-3'-phosphate
  modified_base 10: mod_base = OTHER; note = 2'-O-methylcytidine-3'-phosphate
  modified_base 12: mod_base = OTHER; note = 2'-O-methyluridine-3'-phosphate
  modified_base 13: mod_base = OTHER; note = 2'-O-methyluridine-3'-phosphate
  modified_base 14: mod_base = OTHER; note = 2'-O-methylcytidine-3'-phosphate
  modified_base 15: mod_base = OTHER; note = 2'-O-methyluridine-3'-phosphate
  modified_base 16: mod_base = OTHER; note = 2'-O-methyluridine-3'-phosphate
  modified_base 19: mod_base = OTHER; note = 2'-O-methylcytidine-3'-phosphate
  misc_feature 1..19: note = RNA
  misc_feature 20..21: note = DNA
aagtccactcattcttggctt

SEQ ID NO: 998 - DNA, 21 bp, Homo sapiens
  source 1..21: mol_type = unassigned DNA
  modified_base 3: mod_base = OTHER; note = 2'-O-methylcytidine-3'-phosphate
  misc_feature 1..19: note = RNA
  misc_feature 20..21: note = DNA
gccaagaatgagtggactttt

SEQ ID NO: 999 - DNA, 21 bp, Homo sapiens
  source 1..21: mol_type = unassigned DNA
  modified_base 5: mod_base = OTHER; note = 2'-O-methyluridine-3'-phosphate
  modified_base 6: mod_base = OTHER; note = 2'-O-methyluridine-3'-phosphate
  modified_base 7: mod_base = OTHER; note = 2'-O-methyluridine-3'-phosphate
  modified_base 8: mod_base = OTHER; note = 2'-O-methylcytidine-3'-phosphate
  modified_base 10: mod_base = OTHER; note = 2'-O-methyluridine-3'-phosphate
  modified_base 12: mod_base = OTHER; note = 2'-O-methyluridine-3'-phosphate
  modified_base 15: mod_base = OTHER; note = 2'-O-methylcytidine-3'-phosphate
  modified_base 16: mod_base = OTHER; note = 2'-O-methylcytidine-3'-phosphate
  misc_feature 1..19: note = RNA
  misc_feature 20..21: note = DNA
gggatttcatgtaaccaagtt

SEQ ID NO: 1000 - DNA, 21 bp, Homo sapiens
  source 1..21: mol_type = unassigned DNA
  modified_base 7: mod_base = OTHER; note = 2'-O-methyluridine-3'-phosphate
  modified_base 9: mod_base = OTHER; note = 2'-O-methylcytidine-3'-phosphate
  misc_feature 1..19: note = RNA
  misc_feature 20..21: note = DNA
cttggttacatgaaatccctt

SEQ ID NO: 1001 - DNA, 21 bp, Homo sapiens
  source 1..21: mol_type = unassigned DNA
  modified_base 4: mod_base = OTHER; note = 2'-O-methyluridine-3'-phosphate
  modified_base 5: mod_base = OTHER; note = 2'-O-methyluridine-3'-phosphate
  modified_base 6: mod_base = OTHER; note = 2'-O-methyluridine-3'-phosphate
  modified_base 7: mod_base = OTHER; note = 2'-O-methylcytidine-3'-phosphate
  modified_base 9: mod_base = OTHER; note = 2'-O-methyluridine-3'-phosphate
  modified_base 11: mod_base = OTHER; note = 2'-O-methyluridine-3'-phosphate
  modified_base 14: mod_base = OTHER; note = 2'-O-methylcytidine-3'-phosphate
  modified_base 15: mod_base = OTHER; note = 2'-O-methylcytidine-3'-phosphate
  misc_feature 1..19: note = RNA
  misc_feature 20..21: note = DNA
ggatttcatgtaaccaagatt

SEQ ID NO: 1002 - DNA, 21 bp, Homo sapiens
  source 1..21: mol_type = unassigned DNA
  modified_base 8: mod_base = OTHER; note = 2'-O-methyluridine-3'-phosphate
  modified_base 10: mod_base = OTHER; note = 2'-O-methylcytidine-3'-phosphate
  misc_feature 1..19: note = RNA
  misc_feature 20..21: note = DNA
tcttggttacatgaaatcctt

SEQ ID NO: 1003 - DNA, 21 bp, Homo sapiens
  source 1..21: mol_type = unassigned DNA
  modified_base 1: mod_base = OTHER; note = 2'-O-methyluridine-3'-phosphate
  modified_base 2: mod_base = OTHER; note = 2'-O-methylcytidine-3'-phosphate
  modified_base 4: mod_base = OTHER; note = 2'-O-methyluridine-3'-phosphate
  modified_base 6: mod_base = OTHER; note = 2'-O-methyluridine-3'-phosphate
  modified_base 9: mod_base = OTHER; note = 2'-O-methylcytidine-3'-phosphate
  modified_base 10: mod_base = OTHER; note = 2'-O-methylcytidine-3'-phosphate
  modified_base 16: mod_base = OTHER; note = 2'-O-methyluridine-3'-phosphate
  modified_base 18: mod_base = OTHER; note = 2'-O-methyluridine-3'-phosphate
  modified_base 19: mod_base = OTHER; note = 2'-O-methyluridine-3'-phosphate
  misc_feature 1..19: note = RNA
  misc_feature 20..21: note = DNA
tcatgtaaccaagagtatttt

SEQ ID NO: 1004 - DNA, 21 bp, Homo sapiens
  source 1..21: mol_type = unassigned DNA
  modified_base 3: mod_base = OTHER; note = 2'-O-methyluridine-3'-phosphate
  modified_base 13: mod_base = OTHER; note = 2'-O-methyluridine-3'-phosphate
  modified_base 15: mod_base = OTHER; note = 2'-O-methylcytidine-3'-phosphate
  misc_feature 1..19: note = RNA
  misc_feature 20..21: note = DNA
aatactcttggttacatgatt

SEQ ID NO: 1005 - DNA, 21 bp, Homo sapiens
  source 1..21: mol_type = unassigned DNA
  modified_base 2: mod_base = OTHER; note = 2'-O-methyluridine-3'-phosphate
  modified_base 4: mod_base = OTHER; note = 2'-O-methyluridine-3'-phosphate
  modified_base 7: mod_base = OTHER; note = 2'-O-methylcytidine-3'-phosphate
  modified_base 8: mod_base = OTHER; note = 2'-O-methylcytidine-3'-phosphate
  modified_base 14: mod_base = OTHER; note = 2'-O-methyluridine-3'-phosphate
  modified_base 16: mod_base = OTHER; note = 2'-O-methyluridine-3'-phosphate
  modified_base 17: mod_base = OTHER; note = 2'-O-methyluridine-3'-phosphate
  modified_base 18: mod_base = OTHER; note = 2'-O-methylcytidine-3'-phosphate
  modified_base 19: mod_base = OTHER; note = 2'-O-methylcytidine-3'-phosphate
  misc_feature 1..19: note = RNA
  misc_feature 20..21: note = DNA
atgtaaccaagagtattcctt

SEQ ID NO: 1006 - DNA, 21 bp, Homo sapiens
  source 1..21: mol_type = unassigned DNA
  modified_base 5: mod_base = OTHER; note = 2'-O-methyluridine-3'-phosphate
  modified_base 15: mod_base = OTHER; note = 2'-O-methyluridine-3'-phosphate
  modified_base 17: mod_base = OTHER; note = 2'-O-methylcytidine-3'-phosphate
  misc_feature 1..19: note = RNA
  misc_feature 20..21: note = DNA
ggaatactcttggttacattt

SEQ ID NO: 1007 - DNA, 21 bp, Homo sapiens
  source 1..21: mol_type = unassigned DNA
  modified_base 1: mod_base = OTHER; note = 2'-O-methyluridine-3'-phosphate
  modified_base 3: mod_base = OTHER; note = 2'-O-methyluridine-3'-phosphate
  modified_base 6: mod_base = OTHER; note = 2'-O-methylcytidine-3'-phosphate
  modified_base 7: mod_base = OTHER; note = 2'-O-methylcytidine-3'-phosphate
  modified_base 13: mod_base = OTHER; note = 2'-O-methyluridine-3'-phosphate
  modified_base 15: mod_base = OTHER; note = 2'-O-methyluridine-3'-phosphate
  modified_base 16: mod_base = OTHER; note = 2'-O-methyluridine-3'-phosphate
  modified_base 17: mod_base = OTHER; note = 2'-O-methylcytidine-3'-phosphate
  modified_base 18: mod_base = OTHER; note = 2'-O-methylcytidine-3'-phosphate
  misc_feature 1..19: note = RNA
  misc_feature 20..21: note = DNA
tgtaaccaagagtattccatt

SEQ ID NO: 1008 - DNA, 21 bp, Homo sapiens
  source 1..21: mol_type = unassigned DNA
  modified_base 6: mod_base = OTHER; note = 2'-O-methyluridine-3'-phosphate
  modified_base 16: mod_base = OTHER; note = 2'-O-methyluridine-3'-phosphate
  modified_base 18: mod_base = OTHER; note = 2'-O-methylcytidine-3'-phosphate
  misc_feature 1..19: note = RNA
  misc_feature 20..21: note = DNA
tggaatactcttggttacatt

SEQ ID NO: 1009 - DNA, 21 bp, Homo sapiens
  source 1..21: mol_type = unassigned DNA
  modified_base 2: mod_base = OTHER; note = 2'-O-methyluridine-3'-phosphate
  modified_base 5: mod_base = OTHER; note = 2'-O-methylcytidine-3'-phosphate
  modified_base 6: mod_base = OTHER; note = 2'-O-methylcytidine-3'-phosphate
  modified_base 12: mod_base = OTHER; note = 2'-O-methyluridine-3'-phosphate
  modified_base 14: mod_base = OTHER; note = 2'-O-methyluridine-3'-phosphate
  modified_base 15: mod_base = OTHER; note = 2'-O-methyluridine-3'-phosphate
  modified_base 16: mod_base = OTHER; note = 2'-O-methylcytidine-3'-phosphate
  modified_base 17: mod_base = OTHER; note = 2'-O-methylcytidine-3'-phosphate
  modified_base 19: mod_base = OTHER; note = 2'-O-methyluridine-3'-phosphate
  misc_feature 1..19: note = RNA
  misc_feature 20..21: note = DNA
gtaaccaagagtattccattt

SEQ ID NO: 1010 - DNA, 21 bp, Homo sapiens
  source 1..21: mol_type = unassigned DNA
  modified_base 7: mod_base = OTHER; note = 2'-O-methyluridine-3'-phosphate
  modified_base 17: mod_base = OTHER; note = 2'-O-methyluridine-3'-phosphate
  misc_feature 1..19: note = RNA
  misc_feature 20..21: note = DNA
atggaatactcttggttactt

SEQ ID NO: 1011 - DNA, 21 bp, Homo sapiens
  source 1..21: mol_type = unassigned DNA
  modified_base 1: mod_base = OTHER; note = 2'-O-methyluridine-3'-phosphate
  modified_base 3: mod_base = OTHER; note = 2'-O-methylcytidine-3'-phosphate
  modified_base 4: mod_base = OTHER; note = 2'-O-methylcytidine-3'-phosphate
  modified_base 5: mod_base = OTHER; note = 2'-O-methyluridine-3'-phosphate
  modified_base 6: mod_base = OTHER; note = 2'-O-methyluridine-3'-phosphate
  modified_base 8: mod_base = OTHER; note = 2'-O-methylcytidine-3'-phosphate
  modified_base 9: mod_base = OTHER; note = 2'-O-methyluridine-3'-phosphate
  modified_base 13: mod_base = OTHER; note = 2'-O-methylcytidine-3'-phosphate
  modified_base 14: mod_base = OTHER; note = 2'-O-methyluridine-3'-phosphate
  modified_base 17: mod_base = OTHER; note = 2'-O-methyluridine-3'-phosphate
  modified_base 19: mod_base = OTHER; note = 2'-O-methyluridine-3'-phosphate
  misc_feature 1..19: note = RNA
  misc_feature 20..21: note = DNA
tgccttgctggactggtattt

SEQ ID NO: 1012 - DNA, 21 bp, Homo sapiens
  source 1..21: mol_type = unassigned DNA
  modified_base 2: mod_base = OTHER; note = 2'-O-methyluridine-3'-phosphate
  modified_base 5: mod_base = OTHER; note = 2'-O-methylcytidine-3'-phosphate
  modified_base 10: mod_base = OTHER; note = 2'-O-methylcytidine-3'-phosphate
  modified_base 13: mod_base = OTHER; note = 2'-O-methylcytidine-3'-phosphate
  modified_base 18: mod_base = OTHER; note = 2'-O-methylcytidine-3'-phosphate
  misc_feature 1..19: note = RNA
  misc_feature 20..21: note = DNA
ataccagtccagcaaggcatt

SEQ ID NO: 1013 - DNA, 21 bp, Homo sapiens
  source 1..21: mol_type = unassigned DNA
  modified_base 1: mod_base = OTHER; note = 2'-O-methyluridine-3'-phosphate
  modified_base 6: mod_base = OTHER; note = 2'-O-methylcytidine-3'-phosphate
  modified_base 9: mod_base = OTHER; note = 2'-O-methyluridine-3'-phosphate
  modified_base 11: mod_base = OTHER; note = 2'-O-methyluridine-3'-phosphate
  modified_base 12: mod_base = OTHER; note = 2'-O-methyluridine-3'-phosphate
  modified_base 13: mod_base = OTHER; note = 2'-O-methyluridine-3'-phosphate
  modified_base 14: mod_base = OTHER; note = 2'-O-methyluridine-3'-phosphate
  modified_base 15: mod_base = OTHER; note = 2'-O-methylcytidine-3'-phosphate
  modified_base 17: mod_base = OTHER; note = 2'-O-methylcytidine-3'-phosphate
  modified_base 18: mod_base = OTHER; note = 2'-O-methylcytidine-3'-phosphate
  modified_base 19: mod_base = OTHER; note = 2'-O-methyluridine-3'-phosphate
  misc_feature 1..19: note = RNA
  misc_feature 20..21: note = DNA
taaagcagtgttttcaccttt

SEQ ID NO: 1014 - DNA, 21 bp, Homo sapiens
  source 1..21: mol_type = unassigned DNA
  modified_base 10: mod_base = OTHER; note = 2'-O-methylcytidine-3'-phosphate
  modified_base 18: mod_base = OTHER; note = 2'-O-methyluridine-3'-phosphate
  misc_feature 1..19: note = RNA
  misc_feature 20..21: note = DNA
aggtgaaaacactgctttatt

SEQ ID NO: 1015 - DNA, 21 bp, Homo sapiens
  source 1..21: mol_type = unassigned DNA
  modified_base 2: mod_base = OTHER; note = 2'-O-methylcytidine-3'-phosphate
  modified_base 3: mod_base = OTHER; note = 2'-O-methylcytidine-3'-phosphate
  modified_base 4: mod_base = OTHER; note = 2'-O-methyluridine-3'-phosphate
  modified_base 5: mod_base = OTHER; note = 2'-O-methyluridine-3'-phosphate
  modified_base 7: mod_base = OTHER; note = 2'-O-methylcytidine-3'-phosphate
  modified_base 8: mod_base = OTHER; note = 2'-O-methyluridine-3'-phosphate
  modified_base 12: mod_base = OTHER; note = 2'-O-methylcytidine-3'-phosphate
  modified_base 13: mod_base = OTHER; note = 2'-O-methyluridine-3'-phosphate
  modified_base 16: mod_base = OTHER; note = 2'-O-methyluridine-3'-phosphate
  modified_base 18: mod_base = OTHER; note = 2'-O-methyluridine-3'-phosphate
  modified_base 19: mod_base = OTHER; note = 2'-O-methyluridine-3'-phosphate
  misc_feature 1..19: note = RNA
  misc_feature 20..21: note = DNA
gccttgctggactggtatttt

SEQ ID NO: 1016 - DNA, 21 bp, Homo sapiens
  source 1..21: mol_type = unassigned DNA
  modified_base 3: mod_base = OTHER; note = 2'-O-methyluridine-3'-phosphate
  modified_base 6: mod_base = OTHER; note = 2'-O-methylcytidine-3'-phosphate
  modified_base 11: mod_base = OTHER; note = 2'-O-methylcytidine-3'-phosphate
  modified_base 14: mod_base = OTHER; note = 2'-O-methylcytidine-3'-phosphate
  misc_feature 1..19: note = RNA
  misc_feature 20..21: note = DNA
aataccagtccagcaaggctt

SEQ ID NO: 1017 - DNA, 21 bp, Homo sapiens
  source 1..21: mol_type = unassigned DNA
  modified_base 1: mod_base = OTHER; note = 2'-O-methyluridine-3'-phosphate
  modified_base 3: mod_base = OTHER; note = 2'-O-methyluridine-3'-phosphate
  modified_base 4: mod_base = OTHER; note = 2'-O-methyluridine-3'-phosphate
  modified_base 5: mod_base = OTHER; note = 2'-O-methyluridine-3'-phosphate
  modified_base 6: mod_base = OTHER; note = 2'-O-methyluridine-3'-phosphate
  modified_base 7: mod_base = OTHER; note = 2'-O-methylcytidine-3'-phosphate
  modified_base 9: mod_base = OTHER; note = 2'-O-methylcytidine-3'-phosphate
  modified_base 10: mod_base = OTHER; note = 2'-O-methylcytidine-3'-phosphate
  modified_base 11: mod_base = OTHER; note = 2'-O-methyluridine-3'-phosphate
  modified_base 12: mod_base = OTHER; note = 2'-O-methylcytidine-3'-phosphate
  modified_base 14: mod_base = OTHER; note = 2'-O-methyluridine-3'-phosphate
  modified_base 16: mod_base = OTHER; note = 2'-O-methyluridine-3'-phosphate
  modified_base 18: mod_base = OTHER; note = 2'-O-methylcytidine-3'-phosphate
  modified_base 19: mod_base = OTHER; note = 2'-O-methyluridine-3'-phosphate
  misc_feature 1..19: note = RNA
  misc_feature 20..21: note = DNA
tgttttcacctcatatgcttt

SEQ ID NO: 1018 - DNA, 21 bp, Homo sapiens
  source 1..21: mol_type = unassigned DNA
  modified_base 3: mod_base = OTHER; note = 2'-O-methylcytidine-3'-phosphate
  modified_base 5: mod_base = OTHER; note = 2'-O-methyluridine-3'-phosphate
  modified_base 18: mod_base = OTHER; note = 2'-O-methylcytidine-3'-phosphate
  misc_feature 1..19: note = RNA
  misc_feature 20..21: note = DNA
agcatatgaggtgaaaacatt

SEQ ID NO: 1019 - DNA, 21 bp, Homo sapiens
  source 1..21: mol_type = unassigned DNA
  modified_base 2: mod_base = OTHER; note = 2'-O-methyluridine-3'-phosphate
  modified_base 3: mod_base = OTHER; note = 2'-O-methyluridine-3'-phosphate
  modified_base 4: mod_base = OTHER; note = 2'-O-methyluridine-3'-phosphate
  modified_base 5: mod_base = OTHER; note = 2'-O-methyluridine-3'-phosphate
  modified_base 6: mod_base = OTHER; note = 2'-O-methylcytidine-3'-phosphate
  modified_base 8: mod_base = OTHER; note = 2'-O-methylcytidine-3'-phosphate
  modified_base 9: mod_base = OTHER; note = 2'-O-methylcytidine-3'-phosphate
  modified_base 10: mod_base = OTHER; note = 2'-O-methyluridine-3'-phosphate
  modified_base 11: mod_base = OTHER; note = 2'-O-methylcytidine-3'-phosphate
  modified_base 13: mod_base = OTHER; note = 2'-O-methyluridine-3'-phosphate
  modified_base 15: mod_base = OTHER; note = 2'-O-methyluridine-3'-phosphate
  modified_base 17: mod_base = OTHER; note = 2'-O-methylcytidine-3'-phosphate
  modified_base 18: mod_base = OTHER; note = 2'-O-methyluridine-3'-phosphate
  misc_feature 1..19: note = RNA
  misc_feature 20..21: note = DNA
gttttcacctcatatgctatt

SEQ ID NO: 1020 - DNA, 21 bp, Homo sapiens
  source 1..21: mol_type = unassigned DNA
  modified_base 1: mod_base = OTHER; note = 2'-O-methyluridine-3'-phosphate
  modified_base 4: mod_base = OTHER; note = 2'-O-methylcytidine-3'-phosphate
  modified_base 6: mod_base = OTHER; note = 2'-O-methyluridine-3'-phosphate
  misc_feature 1..19: note = RNA
  misc_feature 20..21: note = DNA
tagcatatgaggtgaaaactt

SEQ ID NO: 1021 - DNA, 21 bp, Homo sapiens
  source 1..21: mol_type = unassigned DNA
  modified_base 1: mod_base = OTHER; note = 2'-O-methyluridine-3'-phosphate
  modified_base 2: mod_base = OTHER; note = 2'-O-methyluridine-3'-phosphate
  modified_base 3: mod_base = OTHER; note = 2'-O-methyluridine-3'-phosphate
  modified_base 4: mod_base = OTHER; note = 2'-O-methyluridine-3'-phosphate
  modified_base 5: mod_base = OTHER; note = 2'-O-methylcytidine-3'-phosphate
  modified_base 7: mod_base = OTHER; note = 2'-O-methylcytidine-3'-phosphate
  modified_base 8: mod_base = OTHER; note = 2'-O-methylcytidine-3'-phosphate
  modified_base 9: mod_base = OTHER; note = 2'-O-methyluridine-3'-phosphate
  modified_base 10: mod_base = OTHER; note = 2'-O-methylcytidine-3'-phosphate
  modified_base 12: mod_base = OTHER; note = 2'-O-methyluridine-3'-phosphate
  modified_base 14: mod_base = OTHER; note = 2'-O-methyluridine-3'-phosphate
  modified_base 16: mod_base = OTHER; note = 2'-O-methylcytidine-3'-phosphate
  modified_base 17: mod_base = OTHER; note = 2'-O-methyluridine-3'-phosphate
  modified_base 19: mod_base = OTHER; note = 2'-O-methyluridine-3'-phosphate
  misc_feature 1..19: note = RNA
  misc_feature 20..21: note = DNA
ttttcacctcatatgctattt

SEQ ID NO: 1022 - DNA, 21 bp, Homo sapiens
  source 1..21: mol_type = unassigned DNA
  modified_base 2: mod_base = OTHER; note = 2'-O-methyluridine-3'-phosphate
  modified_base 5: mod_base = OTHER; note = 2'-O-methylcytidine-3'-phosphate
  modified_base 7: mod_base = OTHER; note = 2'-O-methyluridine-3'-phosphate
  misc_feature 1..19: note = RNA
  misc_feature 20..21: note = DNA
atagcatatgaggtgaaaatt

SEQ ID NO: 1023 - DNA, 21 bp, Homo sapiens
  source 1..21: mol_type = unassigned DNA
  modified_base 1: mod_base = OTHER; note = 2'-O-methyluridine-3'-phosphate
  modified_base 2: mod_base = OTHER; note = 2'-O-methyluridine-3'-phosphate
  modified_base 3: mod_base = OTHER; note = 2'-O-methylcytidine-3'-phosphate
  modified_base 5: mod_base = OTHER; note = 2'-O-methylcytidine-3'-phosphate
  modified_base 6: mod_base = OTHER; note = 2'-O-methylcytidine-3'-phosphate
  modified_base 7: mod_base = OTHER; note = 2'-O-methyluridine-3'-phosphate
  modified_base 8: mod_base = OTHER; note = 2'-O-methylcytidine-3'-phosphate
  modified_base 10: mod_base = OTHER; note = 2'-O-methyluridine-3'-phosphate
  modified_base 12: mod_base = OTHER; note = 2'-O-methyluridine-3'-phosphate
  modified_base 14: mod_base = OTHER; note = 2'-O-methylcytidine-3'-phosphate
  modified_base 15: mod_base = OTHER; note = 2'-O-methyluridine-3'-phosphate
  modified_base 17: mod_base = OTHER; note = 2'-O-methyluridine-3'-phosphate
  modified_base 19: mod_base = OTHER; note = 2'-O-methyluridine-3'-phosphate
  misc_feature 1..19: note = RNA
  misc_feature 20..21: note = DNA
ttcacctcatatgctatgttt

SEQ ID NO: 1024 - DNA, 21 bp, Homo sapiens
  source 1..21: mol_type = unassigned DNA
  modified_base 2: mod_base = OTHER; note = 2'-O-methylcytidine-3'-phosphate
  modified_base 4: mod_base = OTHER; note = 2'-O-methyluridine-3'-phosphate
  modified_base 7: mod_base = OTHER; note = 2'-O-methylcytidine-3'-phosphate
  modified_base 9: mod_base = OTHER; note = 2'-O-methyluridine-3'-phosphate
  misc_feature 1..19: note = RNA
  misc_feature 20..21: note = DNA
acatagcatatgaggtgaatt

SEQ ID NO: 1025 - DNA, 21 bp, Homo sapiens
  source 1..21: mol_type = unassigned DNA
  modified_base 1: mod_base = OTHER; note = 2'-O-methylcytidine-3'-phosphate
  modified_base 3: mod_base = OTHER; note = 2'-O-methylcytidine-3'-phosphate
  modified_base 4: mod_base = OTHER; note = 2'-O-methylcytidine-3'-phosphate
  modified_base 5: mod_base = OTHER; note = 2'-O-methyluridine-3'-phosphate
  modified_base 6: mod_base = OTHER; note = 2'-O-methylcytidine-3'-phosphate
  modified_base 8: mod_base = OTHER; note = 2'-O-methyluridine-3'-phosphate
  modified_base 10: mod_base = OTHER; note = 2'-O-methyluridine-3'-phosphate
  modified_base 12: mod_base = OTHER; note = 2'-O-methylcytidine-3'-phosphate
  modified_base 13: mod_base = OTHER; note = 2'-O-methyluridine-3'-phosphate
  modified_base 15: mod_base = OTHER; note = 2'-O-methyluridine-3'-phosphate
  modified_base 17: mod_base = OTHER; note = 2'-O-methyluridine-3'-phosphate
  modified_base 18: mod_base = OTHER; note = 2'-O-methyluridine-3'-phosphate
  misc_feature 1..19: note = RNA
  misc_feature 20..21: note = DNA
cacctcatatgctatgttatt

SEQ ID NO: 1026 - DNA, 21 bp, Homo sapiens
  source 1..21: mol_type = unassigned DNA
  modified_base 1: mod_base = OTHER; note = 2'-O-methyluridine-3'-phosphate
  modified_base 4: mod_base = OTHER; note = 2'-O-methylcytidine-3'-phosphate
  modified_base 6: mod_base = OTHER; note = 2'-O-methyluridine-3'-phosphate
  modified_base 9: mod_base = OTHER; note = 2'-O-methylcytidine-3'-phosphate
  modified_base 11: mod_base = OTHER; note = 2'-O-methyluridine-3'-phosphate
  misc_feature 1..19: note = RNA
  misc_feature 20..21: note = DNA
taacatagcatatgaggtgtt

SEQ ID NO: 1027 - DNA, 21 bp, Homo sapiens
  source 1..21: mol_type = unassigned DNA
  modified_base 1: mod_base = OTHER; note = 2'-O-methylcytidine-3'-phosphate
  modified_base 2: mod_base = OTHER; note = 2'-O-methylcytidine-3'-phosphate
  modified_base 3: mod_base = OTHER; note = 2'-O-methyluridine-3'-phosphate
  modified_base 4: mod_base = OTHER; note = 2'-O-methyluridine-3'-phosphate
  modified_base 6: mod_base = OTHER; note = 2'-O-methylcytidine-3'-phosphate
  modified_base 7: mod_base = OTHER; note = 2'-O-methyluridine-3'-phosphate
  modified_base 11: mod_base = OTHER; note = 2'-O-methylcytidine-3'-phosphate
  modified_base 12: mod_base = OTHER; note = 2'-O-methyluridine-3'-phosphate
  modified_base 15: mod_base = OTHER; note = 2'-O-methyluridine-3'-phosphate
  modified_base 17: mod_base = OTHER; note = 2'-O-methyluridine-3'-phosphate
  modified_base 18: mod_base = OTHER; note = 2'-O-methyluridine-3'-phosphate
  modified_base 19: mod_base = OTHER; note = 2'-O-methyluridine-3'-phosphate
  misc_feature 1..19: note = RNA
  misc_feature 20..21: note = DNA
ccttgctggactggtattttt

SEQ ID NO: 1028 - DNA, 21 bp, Homo sapiens
  source 1..21: mol_type = unassigned DNA
  modified_base 4: mod_base = OTHER; note = 2'-O-methyluridine-3'-phosphate
  modified_base 7: mod_base = OTHER; note = 2'-O-methylcytidine-3'-phosphate
  modified_base 12: mod_base = OTHER; note = 2'-O-methylcytidine-3'-phosphate
  modified_base 15: mod_base = OTHER; note = 2'-O-methylcytidine-3'-phosphate
  misc_feature 1..19: note = RNA
  misc_feature 20..21: note = DNA
aaataccagtccagcaaggtt

SEQ ID NO: 1029 - DNA, 21 bp, Homo sapiens
  source 1..21: mol_type = unassigned DNA
  modified_base 2: mod_base = OTHER; note = 2'-O-methyluridine-3'-phosphate
  modified_base 4: mod_base = OTHER; note = 2'-O-methyluridine-3'-phosphate
  modified_base 6: mod_base = OTHER; note = 2'-O-methylcytidine-3'-phosphate
  modified_base 7: mod_base = OTHER; note = 2'-O-methyluridine-3'-phosphate
  modified_base 9: mod_base = OTHER; note = 2'-O-methyluridine-3'-phosphate
  modified_base 11: mod_base = OTHER; note = 2'-O-methyluridine-3'-phosphate
  modified_base 12: mod_base = OTHER; note = 2'-O-methyluridine-3'-phosphate
  modified_base 18: mod_base = OTHER; note = 2'-O-methyluridine-3'-phosphate
  modified_base 19: mod_base = OTHER; note = 2'-O-methylcytidine-3'-phosphate
  misc_feature 1..19: note = RNA
  misc_feature 20..21: note = DNA
atatgctatgttagaagtctt

SEQ ID NO: 1030 - DNA, 21 bp, Homo sapiens
  source 1..21: mol_type = unassigned DNA
  modified_base 7: mod_base = OTHER; note = 2'-O-methyluridine-3'-phosphate
  modified_base 10: mod_base = OTHER; note = 2'-O-methylcytidine-3'-phosphate
  modified_base 12: mod_base = OTHER; note = 2'-O-methyluridine-3'-phosphate
  modified_base 15: mod_base = OTHER; note = 2'-O-methylcytidine-3'-phosphate
  modified_base 17: mod_base = OTHER; note = 2'-O-methyluridine-3'-phosphate
  misc_feature 1..19: note = RNA
  misc_feature 20..21: note = DNA
gacttctaacatagcatattt

SEQ ID NO: 1031 - DNA, 21 bp, Homo sapiens
  source 1..21: mol_type = unassigned DNA
  modified_base 1: mod_base = OTHER; note = 2'-O-methyluridine-3'-phosphate
  modified_base 3: mod_base = OTHER; note = 2'-O-methyluridine-3'-phosphate
  modified_base 5: mod_base = OTHER; note = 2'-O-methylcytidine-3'-phosphate
  modified_base 6: mod_base = OTHER; note = 2'-O-methyluridine-3'-phosphate
  modified_base 8: mod_base = OTHER; note = 2'-O-methyluridine-3'-phosphate
  modified_base 10: mod_base = OTHER; note = 2'-O-methyluridine-3'-phosphate
  modified_base 11: mod_base = OTHER; note = 2'-O-methyluridine-3'-phosphate
  modified_base 17: mod_base = OTHER; note = 2'-O-methyluridine-3'-phosphate
  modified_base 18: mod_base = OTHER; note = 2'-O-methylcytidine-3'-phosphate
  modified_base 19: mod_base = OTHER; note = 2'-O-methylcytidine-3'-phosphate
  misc_feature 1..19: note = RNA
  misc_feature 20..21: note = DNA
tatgctatgttagaagtcctt

SEQ ID NO: 1032 - DNA, 21 bp, Homo sapiens
  source 1..21: mol_type = unassigned DNA
  modified_base 8: mod_base = OTHER; note = 2'-O-methyluridine-3'-phosphate
  modified_base 11: mod_base = OTHER; note = 2'-O-methylcytidine-3'-phosphate
  modified_base 13: mod_base = OTHER; note = 2'-O-methyluridine-3'-phosphate
  modified_base 16: mod_base = OTHER; note = 2'-O-methylcytidine-3'-phosphate
  modified_base 18: mod_base = OTHER; note = 2'-O-methyluridine-3'-phosphate
  misc_feature 1..19: note = RNA
  misc_feature 20..21: note = DNA
ggacttctaacatagcatatt

SEQ ID NO: 1033 - DNA, 21 bp, Homo sapiens
  source 1..21: mol_type = unassigned DNA
  modified_base 1: mod_base = OTHER; note = 2'-O-methyluridine-3'-phosphate
  modified_base 3: mod_base = OTHER; note = 2'-O-methylcytidine-3'-phosphate
  modified_base 4: mod_base = OTHER; note = 2'-O-methyluridine-3'-phosphate
  modified_base 6: mod_base = OTHER; note = 2'-O-methyluridine-3'-phosphate
  modified_base 8: mod_base = OTHER; note = 2'-O-methyluridine-3'-phosphate
  modified_base 9: mod_base = OTHER; note = 2'-O-methyluridine-3'-phosphate
  modified_base 15: mod_base = OTHER; note = 2'-O-methyluridine-3'-phosphate
  modified_base 16: mod_base = OTHER; note = 2'-O-methylcytidine-3'-phosphate
  modified_base 17: mod_base = OTHER; note = 2'-O-methylcytidine-3'-phosphate
  misc_feature 1..19: note = RNA
  misc_feature 20..21: note = DNA
tgctatgttagaagtccagtt

SEQ ID NO: 1034 - DNA, 21 bp, Homo sapiens
  source 1..21: mol_type = unassigned DNA
  modified_base 10: mod_base = OTHER; note = 2'-O-methyluridine-3'-phosphate
  modified_base 13: mod_base = OTHER; note = 2'-O-methylcytidine-3'-phosphate
  modified_base 15: mod_base = OTHER; note = 2'-O-methyluridine-3'-phosphate
  modified_base 18: mod_base = OTHER; note = 2'-O-methylcytidine-3'-phosphate
  misc_feature 1..19: note = RNA
  misc_feature 20..21: note = DNA
ctggacttctaacatagcatt

SEQ ID NO: 1035 - DNA, 21 bp, Homo sapiens
  source 1..21: mol_type = unassigned DNA
  modified_base 1: mod_base = OTHER; note = 2'-O-methylcytidine-3'-phosphate
  modified_base 2: mod_base = OTHER; note = 2'-O-methyluridine-3'-phosphate
  modified_base 3: mod_base = OTHER; note = 2'-O-methyluridine-3'-phosphate
  modified_base 5: mod_base = OTHER; note = 2'-O-methylcytidine-3'-phosphate
  modified_base 6: mod_base = OTHER; note = 2'-O-methyluridine-3'-phosphate
  modified_base 10: mod_base = OTHER; note = 2'-O-methylcytidine-3'-phosphate
  modified_base 11: mod_base = OTHER; note = 2'-O-methyluridine-3'-phosphate
  modified_base 14: mod_base = OTHER; note = 2'-O-methyluridine-3'-phosphate
  modified_base 16: mod_base = OTHER; note = 2'-O-methyluridine-3'-phosphate
  modified_base 17: mod_base = OTHER; note = 2'-O-methyluridine-3'-phosphate
  modified_base 18: mod_base = OTHER; note = 2'-O-methyluridine-3'-phosphate
  misc_feature 1..19: note = RNA
  misc_feature 20..21: note = DNA
cttgctggactggtatttgtt

SEQ ID NO: 1036 - DNA, 21 bp, Homo sapiens
  source 1..21: mol_type = unassigned DNA
  modified_base 1: mod_base = OTHER; note = 2'-O-methylcytidine-3'-phosphate
  modified_base 5: mod_base = OTHER; note = 2'-O-methyluridine-3'-phosphate
  modified_base 8: mod_base = OTHER; note = 2'-O-methylcytidine-3'-phosphate
  modified_base 13: mod_base = OTHER; note = 2'-O-methylcytidine-3'-phosphate
  modified_base 16: mod_base = OTHER; note = 2'-O-methylcytidine-3'-phosphate
  misc_feature 1..19: note = RNA
  misc_feature 20..21: note = DNA
caaataccagtccagcaagtt

SEQ ID NO: 1037 - DNA, 21 bp, Homo sapiens
  source 1..21: mol_type = unassigned DNA
  modified_base 3: mod_base = OTHER; note = 2'-O-methyluridine-3'-phosphate
  modified_base 4: mod_base = OTHER; note = 2'-O-methylcytidine-3'-phosphate
  modified_base 5: mod_base = OTHER; note = 2'-O-methylcytidine-3'-phosphate
  modified_base 9: mod_base = OTHER; note = 2'-O-methylcytidine-3'-phosphate
  modified_base 15: mod_base = OTHER; note = 2'-O-methylcytidine-3'-phosphate
  modified_base 18: mod_base = OTHER; note = 2'-O-methyluridine-3'-phosphate
  misc_feature 1..19: note = RNA
  misc_feature 20..21: note = DNA
agtccaggcagagacaatatt

SEQ ID NO: 1038 - DNA, 21 bp, Homo sapiens
  source 1..21: mol_type = unassigned DNA
  modified_base 1: mod_base = OTHER; note = 2'-O-methyluridine-3'-phosphate
  misc_feature 1..19: note = RNA
  misc_feature 20..21: note = DNA
tattgtctctgcctggacttt

SEQ ID NO: 1039 - DNA, 21 bp, Homo sapiens
  source 1..21: mol_type = unassigned DNA
  modified_base 1: mod_base = OTHER; note = 2'-O-methyluridine-3'-phosphate
  modified_base 2: mod_base = OTHER; note = 2'-O-methylcytidine-3'-phosphate
  modified_base 3: mod_base = OTHER; note = 2'-O-methylcytidine-3'-phosphate
  modified_base 7: mod_base = OTHER; note = 2'-O-methylcytidine-3'-phosphate
  modified_base 13: mod_base = OTHER; note = 2'-O-methylcytidine-3'-phosphate
  modified_base 16: mod_base = OTHER; note = 2'-O-methyluridine-3'-phosphate
  misc_feature 1..19: note = RNA
  misc_feature 20..21: note = DNA
tccaggcagagacaataaatt

SEQ ID NO: 1040 - DNA, 21 bp, Homo sapiens
  source 1..21: mol_type = unassigned DNA
  modified_base 3: mod_base = OTHER; note = 2'-O-methyluridine-3'-phosphate
  misc_feature 1..19: note = RNA
  misc_feature 20..21: note = DNA
tttattgtctctgcctggatt

SEQ ID NO: 1041 - DNA, 21 bp, Homo sapiens
  source 1..21: mol_type = unassigned DNA
  modified_base 2: mod_base = OTHER; note = 2'-O-methyluridine-3'-phosphate
  modified_base 9: mod_base = OTHER; note = 2'-O-methylcytidine-3'-phosphate
  modified_base 11: mod_base = OTHER; note = 2'-O-methylcytidine-3'-phosphate
  modified_base 12: mod_base = OTHER; note = 2'-O-methyluridine-3'-phosphate
  modified_base 13: mod_base = OTHER; note = 2'-O-methyluridine-3'-phosphate
  modified_base 14: mod_base = OTHER; note = 2'-O-methyluridine-3'-phosphate
  modified_base 15: mod_base = OTHER; note = 2'-O-methyluridine-3'-phosphate
  modified_base 16: mod_base = OTHER; note = 2'-O-methylcytidine-3'-phosphate
  modified_base 18: mod_base = OTHER; note = 2'-O-methyluridine-3'-phosphate
  modified_base 19: mod_base = OTHER; note = 2'-O-methyluridine-3'-phosphate
  misc_feature 1..19: note = RNA
  misc_feature 20..21: note = DNA
gtgaaaggcacttttcatttt

SEQ ID NO: 1042 - DNA, 21 bp, Homo sapiens
  source 1..21: mol_type = unassigned DNA
  modified_base 17: mod_base = OTHER; note = 2'-O-methylcytidine-3'-phosphate
  misc_feature 1..19: note = RNA
  misc_feature 20..21: note = DNA
aatgaaaagtgcctttcactt

SEQ ID NO: 1043 - DNA, 21 bp, Homo sapiens
  source 1..21: mol_type = unassigned DNA
  modified_base 1: mod_base = OTHER; note = 2'-O-methyluridine-3'-phosphate
  modified_base 5: mod_base = OTHER; note = 2'-O-methylcytidine-3'-phosphate
  modified_base 6: mod_base = OTHER; note = 2'-O-methyluridine-3'-phosphate
  modified_base 9: mod_base = OTHER; note = 2'-O-methyluridine-3'-phosphate
  modified_base 11: mod_base = OTHER; note = 2'-O-methyluridine-3'-phosphate
  modified_base 12: mod_base = OTHER; note = 2'-O-methyluridine-3'-phosphate
  modified_base 13: mod_base = OTHER; note = 2'-O-methyluridine-3'-phosphate
  modified_base 15: mod_base = OTHER; note = 2'-O-methyluridine-3'-phosphate
  modified_base 17: mod_base = OTHER; note = 2'-O-methyluridine-3'-phosphate
  modified_base 18: mod_base = OTHER; note = 2'-O-methylcytidine-3'-phosphate
  modified_base 19: mod_base = OTHER; note = 2'-O-methyluridine-3'-phosphate
  misc_feature 1..19: note = RNA
  misc_feature 20..21: note = DNA
tggactggtatttgtgtcttt

SEQ ID NO: 1044 - DNA, 21 bp, Homo sapiens
  source 1..21: mol_type = unassigned DNA
  modified_base 4: mod_base = OTHER; note = 2'-O-methylcytidine-3'-phosphate
  modified_base 6: mod_base = OTHER; note = 2'-O-methylcytidine-3'-phosphate
  modified_base 10: mod_base = OTHER; note = 2'-O-methyluridine-3'-phosphate
  modified_base 13: mod_base = OTHER; note = 2'-O-methylcytidine-3'-phosphate
  modified_base 18: mod_base = OTHER; note = 2'-O-methylcytidine-3'-phosphate
  misc_feature 1..19: note = RNA
  misc_feature 20..21: note = DNA
agacacaaataccagtccatt

SEQ ID NO: 1045 - DNA, 21 bp, Homo sapiens
  source 1..21: mol_type = unassigned DNA
  modified_base 2: mod_base = OTHER; note = 2'-O-methyluridine-3'-phosphate
  modified_base 3: mod_base = OTHER; note = 2'-O-methylcytidine-3'-phosphate
  modified_base 4: mod_base = OTHER; note = 2'-O-methyluridine-3'-phosphate
  modified_base 9: mod_base = OTHER; note = 2'-O-methylcytidine-3'-phosphate
  modified_base 10: mod_base = OTHER; note = 2'-O-methyluridine-3'-phosphate
  modified_base 13: mod_base = OTHER; note = 2'-O-methylcytidine-3'-phosphate
  modified_base 14: mod_base = OTHER; note = 2'-O-methylcytidine-3'-phosphate
  modified_base 15: mod_base = OTHER; note = 2'-O-methylcytidine-3'-phosphate
  modified_base 16: mod_base = OTHER; note = 2'-O-methyluridine-3'-phosphate
  modified_base 18: mod_base = OTHER; note = 2'-O-methylcytidine-3'-phosphate
  misc_feature 1..19: note = RNA
  misc_feature 20..21: note = DNA
gtctgaggctggccctacgtt

SEQ ID NO: 1046 - DNA, 21 bp, Homo sapiens
  source 1..21: mol_type = unassigned DNA
  modified_base 3: mod_base = OTHER; note = 2'-O-methyluridine-3'-phosphate
  modified_base 9: mod_base = OTHER; note = 2'-O-methylcytidine-3'-phosphate
  modified_base 15: mod_base = OTHER; note = 2'-O-methylcytidine-3'-phosphate
  misc_feature 1..19: note = RNA
  misc_feature 20..21: note = DNA
cgtagggccagcctcagactt

SEQ ID NO: 1047 - DNA, 21 bp, Homo sapiens
  source 1..21: mol_type = unassigned DNA
  modified_base 1: mod_base = OTHER; note = 2'-O-methylcytidine-3'-phosphate
  modified_base 2: mod_base = OTHER; note = 2'-O-methyluridine-3'-phosphate
  modified_base 7: mod_base = OTHER; note = 2'-O-methylcytidine-3'-phosphate
  modified_base 8: mod_base = OTHER; note = 2'-O-methyluridine-3'-phosphate
  modified_base 11: mod_base = OTHER; note = 2'-O-methylcytidine-3'-phosphate
  modified_base 12: mod_base = OTHER; note = 2'-O-methylcytidine-3'-phosphate
  modified_base 13: mod_base = OTHER; note = 2'-O-methylcytidine-3'-phosphate
  modified_base 14: mod_base = OTHER; note = 2'-O-methyluridine-3'-phosphate
  modified_base 16: mod_base = OTHER; note = 2'-O-methylcytidine-3'-phosphate
  misc_feature 1..19: note = RNA
  misc_feature 20..21: note = DNA
ctgaggctggccctacgggtt

SEQ ID NO: 1048 - DNA, 21 bp, Homo sapiens
  source 1..21: mol_type = unassigned DNA
  modified_base 5: mod_base = OTHER; note = 2'-O-methyluridine-3'-phosphate
  modified_base 11: mod_base = OTHER; note = 2'-O-methylcytidine-3'-phosphate
  modified_base 17: mod_base = OTHER; note = 2'-O-methylcytidine-3'-phosphate
  misc_feature 1..19: note = RNA
  misc_feature 20..21: note = DNA
cccgtagggccagcctcagtt

SEQ ID NO: 1049 - DNA, 21 bp, Homo sapiens
  source 1..21: mol_type = unassigned DNA
  modified_base 5: mod_base = OTHER; note = 2'-O-methylcytidine-3'-phosphate
  modified_base 6: mod_base = OTHER; note = 2'-O-methyluridine-3'-phosphate
  modified_base 9: mod_base = OTHER; note = 2'-O-methylcytidine-3'-phosphate
  modified_base 10: mod_base = OTHER; note = 2'-O-methylcytidine-3'-phosphate
  modified_base 11: mod_base = OTHER; note = 2'-O-methylcytidine-3'-phosphate
  modified_base 12: mod_base = OTHER; note = 2'-O-methyluridine-3'-phosphate
  modified_base 14: mod_base = OTHER; note = 2'-O-methylcytidine-3'-phosphate
  modified_base 18: mod_base = OTHER; note = 2'-O-methylcytidine-3'-phosphate
  misc_feature 1..19: note = RNA
  misc_feature 20..21: note = DNA
gaggctggccctacgggcatt

SEQ ID NO: 1050 - DNA, 21 bp, Homo sapiens
  source 1..21: mol_type = unassigned DNA
  modified_base 7: mod_base = OTHER; note = 2'-O-methyluridine-3'-phosphate
  modified_base 13: mod_base = OTHER; note = 2'-O-methylcytidine-3'-phosphate
  misc_feature 1..19: note = RNA
  misc_feature 20..21: note = DNA
tgcccgtagggccagcctctt

SEQ ID NO: 1051 - DNA, 21 bp, Homo sapiens
  source 1..21: mol_type = unassigned DNA
  modified_base 4: mod_base = OTHER; note = 2'-O-methylcytidine-3'-phosphate
  modified_base 5: mod_base = OTHER; note = 2'-O-methyluridine-3'-phosphate
  modified_base 8: mod_base = OTHER; note = 2'-O-methylcytidine-3'-phosphate
  modified_base 9: mod_base = OTHER; note = 2'-O-methylcytidine-3'-phosphate
  modified_base 10: mod_base = OTHER; note = 2'-O-methylcytidine-3'-phosphate
  modified_base 11: mod_base = OTHER; note = 2'-O-methyluridine-3'-phosphate
  modified_base 13: mod_base = OTHER; note = 2'-O-methylcytidine-3'-phosphate
  modified_base 17: mod_base = OTHER; note = 2'-O-methylcytidine-3'-phosphate
  modified_base 19: mod_base = OTHER; note = 2'-O-methylcytidine-3'-phosphate
  misc_feature 1..19: note = RNA
  misc_feature 20..21: note = DNA
aggctggccctacgggcactt

SEQ ID NO: 1052 - DNA, 21 bp, Homo sapiens
  source 1..21: mol_type = unassigned DNA
  modified_base 8: mod_base = OTHER; note = 2'-O-methyluridine-3'-phosphate
  modified_base 14: mod_base = OTHER; note = 2'-O-methylcytidine-3'-phosphate
  misc_feature 1..19: note = RNA
  misc_feature 20..21: note = DNA
gtgcccgtagggccagccttt

SEQ ID NO: 1053 - DNA, 21 bp, Homo sapiens
  source 1..21: mol_type = unassigned DNA
  modified_base 2: mod_base = OTHER; note = 2'-O-methylcytidine-3'-phosphate
  modified_base 3: mod_base = OTHER; note = 2'-O-methyluridine-3'-phosphate
  modified_base 6: mod_base = OTHER; note = 2'-O-methylcytidine-3'-phosphate
  modified_base 7: mod_base = OTHER; note = 2'-O-methylcytidine-3'-phosphate
  modified_base 8: mod_base = OTHER; note = 2'-O-methylcytidine-3'-phosphate
  modified_base 9: mod_base = OTHER; note = 2'-O-methyluridine-3'-phosphate
  modified_base 11: mod_base = OTHER; note = 2'-O-methylcytidine-3'-phosphate
  modified_base 15: mod_base = OTHER; note = 2'-O-methylcytidine-3'-phosphate
  modified_base 17: mod_base = OTHER; note = 2'-O-methylcytidine-3'-phosphate
  modified_base 18: mod_base = OTHER; note = 2'-O-methylcytidine-3'-phosphate
  misc_feature 1..19: note = RNA
  misc_feature 20..21: note = DNA
gctggccctacgggcaccgtt

SEQ ID NO: 1054 - DNA, 21 bp, Homo sapiens
  source 1..21: mol_type = unassigned DNA
  modified_base 10: mod_base = OTHER; note = 2'-O-methyluridine-3'-phosphate
  modified_base 16: mod_base = OTHER; note = 2'-O-methylcytidine-3'-phosphate
  misc_feature 1..19: note = RNA
  misc_feature 20..21: note = DNA
cggtgcccgtagggccagctt

SEQ ID NO: 1055 - DNA, 21 bp, Homo sapiens
  source 1..21: mol_type = unassigned DNA
  modified_base 1: mod_base = OTHER; note = 2'-O-methylcytidine-3'-phosphate
  modified_base 2: mod_base = OTHER; note = 2'-O-methyluridine-3'-phosphate
  modified_base 5: mod_base = OTHER; note = 2'-O-methylcytidine-3'-phosphate
  modified_base 6: mod_base = OTHER; note = 2'-O-methylcytidine-3'-phosphate
  modified_base 7: mod_base = OTHER; note = 2'-O-methylcytidine-3'-phosphate
  modified_base 8: mod_base = OTHER; note = 2'-O-methyluridine-3'-phosphate
  modified_base 10: mod_base = OTHER; note = 2'-O-methylcytidine-3'-phosphate
  modified_base 14: mod_base = OTHER; note = 2'-O-methylcytidine-3'-phosphate
  modified_base 16: mod_base = OTHER; note = 2'-O-methylcytidine-3'-phosphate
  modified_base 17: mod_base = OTHER; note = 2'-O-methylcytidine-3'-phosphate
  misc_feature 1..19: note = RNA
  misc_feature 20..21: note = DNA
ctggccctacgggcaccggtt

SEQ ID NO: 1056 - DNA, 21 bp, Homo sapiens
  source 1..21: mol_type = unassigned DNA
  modified_base 11: mod_base = OTHER; note = 2'-O-methyluridine-3'-phosphate
  modified_base 17: mod_base = OTHER; note = 2'-O-methylcytidine-3'-phosphate
  misc_feature 1..19: note = RNA
  misc_feature 20..21: note = DNA
ccggtgcccgtagggccagtt

SEQ ID NO: 1057 - DNA, 21 bp, Homo sapiens
  source 1..21: mol_type = unassigned DNA
  modified_base 3: mod_base = OTHER; note = 2'-O-methylcytidine-3'-phosphate
  modified_base 4: mod_base = OTHER; note = 2'-O-methylcytidine-3'-phosphate
  modified_base 5: mod_base = OTHER; note = 2'-O-methylcytidine-3'-phosphate
  modified_base 6: mod_base = OTHER; note = 2'-O-methyluridine-3'-phosphate
  modified_base 8: mod_base = OTHER; note = 2'-O-methylcytidine-3'-phosphate
  modified_base 12: mod_base = OTHER; note = 2'-O-methylcytidine-3'-phosphate
  modified_base 14: mod_base = OTHER; note = 2'-O-methylcytidine-3'-phosphate
  modified_base 15: mod_base = OTHER; note = 2'-O-methylcytidine-3'-phosphate
  modified_base 18: mod_base = OTHER; note = 2'-O-methyluridine-3'-phosphate
  misc_feature 1..19: note = RNA
  misc_feature 20..21: note = DNA
ggccctacgggcaccggtgtt

SEQ ID NO: 1058 - DNA, 21 bp, Homo sapiens
  source 1..21: mol_type = unassigned DNA
  modified_base 1: mod_base = OTHER; note = 2'-O-methylcytidine-3'-phosphate
  modified_base 13: mod_base = OTHER; note = 2'-O-methyluridine-3'-phosphate
  misc_feature 1..19: note = RNA
  misc_feature 20..21: note = DNA
caccggtgcccgtagggcctt

SEQ ID NO: 1059 - DNA, 21 bp, Homo sapiens
  source 1..21: mol_type = unassigned DNA
  modified_base 1: mod_base = OTHER; note = 2'-O-methylcytidine-3'-phosphate
  modified_base 2: mod_base = OTHER; note = 2'-O-methylcytidine-3'-phosphate
  modified_base 4: mod_base = OTHER; note = 2'-O-methylcytidine-3'-phosphate
  modified_base 5: mod_base = OTHER; note = 2'-O-methyluridine-3'-phosphate
  modified_base 6: mod_base = OTHER; note = 2'-O-methylcytidine-3'-phosphate
  modified_base 8: mod_base = OTHER; note = 2'-O-methyluridine-3'-phosphate
  modified_base 9: mod_base = OTHER; note = 2'-O-methyluridine-3'-phosphate
  modified_base 10: mod_base = OTHER; note = 2'-O-methylcytidine-3'-phosphate
  modified_base 11: mod_base = OTHER; note = 2'-O-methyluridine-3'-phosphate
  modified_base 12: mod_base = OTHER; note = 2'-O-methyluridine-3'-phosphate
  modified_base 15: mod_base = OTHER; note = 2'-O-methylcytidine-3'-phosphate
  misc_feature 1..19: note = RNA
  misc_feature 20..21: note = DNA
ccactcattcttggcaggatt

SEQ ID NO: 1060 - DNA, 21 bp, Homo sapiens
  source 1..21: mol_type = unassigned DNA
  modified_base 7: mod_base = OTHER; note = 2'-O-methylcytidine-3'-phosphate
  misc_feature 1..19: note = RNA
  misc_feature 20..21: note = DNA
tcctgccaagaatgagtggtt

SEQ ID NO: 1061 - DNA, 21 bp, Homo sapiens
  source 1..21: mol_type = unassigned DNA
  modified_base 1: mod_base = OTHER; note = 2'-O-methylcytidine-3'-phosphate
  modified_base 2: mod_base = OTHER; note = 2'-O-methylcytidine-3'-phosphate
  modified_base 3: mod_base = OTHER; note = 2'-O-methyluridine-3'-phosphate
  modified_base 5: mod_base = OTHER; note = 2'-O-methylcytidine-3'-phosphate
  modified_base 9: mod_base = OTHER; note = 2'-O-methylcytidine-3'-phosphate
  modified_base 11: mod_base = OTHER; note = 2'-O-methylcytidine-3'-phosphate
  modified_base 12: mod_base = OTHER; note = 2'-O-methylcytidine-3'-phosphate
  modified_base 15: mod_base = OTHER; note = 2'-O-methyluridine-3'-phosphate
  modified_base 19: mod_base = OTHER; note = 2'-O-methyluridine-3'-phosphate
  misc_feature 1..19: note = RNA
  misc_feature 20..21: note = DNA
cctacgggcaccggtgaattt

SEQ ID NO: 1062 - DNA, 21 bp, Homo sapiens
  source 1..21: mol_type = unassigned DNA
  modified_base 4: mod_base = OTHER; note = 2'-O-methylcytidine-3'-phosphate
  modified_base 16: mod_base = OTHER; note = 2'-O-methyluridine-3'-phosphate
  misc_feature 1..19: note = RNA
  misc_feature 20..21: note = DNA
attcaccggtgcccgtaggtt

SEQ ID NO: 1063 - DNA, 21 bp, Homo sapiens
  source 1..21: mol_type = unassigned DNA
  modified_base 1: mod_base = OTHER; note = 2'-O-methylcytidine-3'-phosphate
  modified_base 2: mod_base = OTHER; note = 2'-O-methyluridine-3'-phosphate
  modified_base 4: mod_base = OTHER; note = 2'-O-methylcytidine-3'-phosphate
  modified_base 8: mod_base = OTHER; note = 2'-O-methylcytidine-3'-phosphate
  modified_base 10: mod_base = OTHER; note = 2'-O-methylcytidine-3'-phosphate
  modified_base 11: mod_base = OTHER; note = 2'-O-methylcytidine-3'-phosphate
  modified_base 14: mod_base = OTHER; note = 2'-O-methyluridine-3'-phosphate
  modified_base 18: mod_base = OTHER; note = 2'-O-methyluridine-3'-phosphate
  modified_base 19: mod_base = OTHER; note = 2'-O-methylcytidine-3'-phosphate
  misc_feature 1..19: note = RNA
  misc_feature 20..21: note = DNA
ctacgggcaccggtgaatctt

SEQ ID NO: 1064 - DNA, 21 bp, Homo sapiens
  source 1..21: mol_type = unassigned DNA
  modified_base 5: mod_base = OTHER; note = 2'-O-methylcytidine-3'-phosphate
  modified_base 17: mod_base = OTHER; note = 2'-O-methyluridine-3'-phosphate
  misc_feature 1..19: note = RNA
  misc_feature 20..21: note = DNA
gattcaccggtgcccgtagtt

SEQ ID NO: 1065 - DNA, 21 bp, Homo sapiens
  source 1..21: mol_type = unassigned DNA
  modified_base 1: mod_base = OTHER; note = 2'-O-methyluridine-3'-phosphate
  modified_base 3: mod_base = OTHER; note = 2'-O-methylcytidine-3'-phosphate
  modified_base 7: mod_base = OTHER; note = 2'-O-methylcytidine-3'-phosphate
  modified_base 9: mod_base = OTHER; note = 2'-O-methylcytidine-3'-phosphate
  modified_base 10: mod_base = OTHER; note = 2'-O-methylcytidine-3'-phosphate
  modified_base 13: mod_base = OTHER; note = 2'-O-methyluridine-3'-phosphate
  modified_base 17: mod_base = OTHER; note = 2'-O-methyluridine-3'-phosphate
  modified_base 18: mod_base = OTHER; note = 2'-O-methylcytidine-3'-phosphate
  modified_base 19: mod_base = OTHER; note = 2'-O-methylcytidine-3'-phosphate
  misc_feature 1..19: note = RNA
  misc_feature 20..21: note = DNA
tacgggcaccggtgaatcctt

SEQ ID NO: 1066 - DNA, 21 bp, Homo sapiens
  source 1..21: mol_type = unassigned DNA
  modified_base 6: mod_base = OTHER; note = 2'-O-methylcytidine-3'-phosphate
  modified_base 18: mod_base = OTHER; note = 2'-O-methyluridine-3'-phosphate
  misc_feature 1..19: note = RNA
  misc_feature 20..21: note = DNA
ggattcaccggtgcccgtatt

SEQ ID NO: 1067 - DNA, 21 bp, Homo sapiens
  source 1..21: mol_type = unassigned DNA
  modified_base 2: mod_base = OTHER; note = 2'-O-methylcytidine-3'-phosphate
  modified_base 6: mod_base = OTHER; note = 2'-O-methylcytidine-3'-phosphate
  modified_base 8: mod_base = OTHER; note = 2'-O-methylcytidine-3'-phosphate
  modified_base 9: mod_base = OTHER; note = 2'-O-methylcytidine-3'-phosphate
  modified_base 12: mod_base = OTHER; note = 2'-O-methyluridine-3'-phosphate
  modified_base 16: mod_base = OTHER; note = 2'-O-methyluridine-3'-phosphate
  modified_base 17: mod_base = OTHER; note = 2'-O-methylcytidine-3'-phosphate
  modified_base 18: mod_base = OTHER; note = 2'-O-methylcytidine-3'-phosphate
  misc_feature 1..19: note = RNA
  misc_feature 20..21: note = DNA
acgggcaccggtgaatccatt

SEQ ID NO: 1068 - DNA, 21 bp, Homo sapiens
  source 1..21: mol_type = unassigned DNA
  modified_base 7: mod_base = OTHER; note = 2'-O-methylcytidine-3'-phosphate
  misc_feature 1..19: note = RNA
  misc_feature 20..21: note = DNA
tggattcaccggtgcccgttt

SEQ ID NO: 1069 - DNA, 21 bp, Homo sapiens
  source 1..21: mol_type = unassigned DNA
  modified_base 2: mod_base = OTHER; note = 2'-O-methylcytidine-3'-phosphate
  modified_base 4: mod_base = OTHER; note = 2'-O-methylcytidine-3'-phosphate
  modified_base 5: mod_base = OTHER; note = 2'-O-methylcytidine-3'-phosphate
  modified_base 8: mod_base = OTHER; note = 2'-O-methyluridine-3'-phosphate
  modified_base 12: mod_base = OTHER; note = 2'-O-methyluridine-3'-phosphate
  modified_base 13: mod_base = OTHER; note = 2'-O-methylcytidine-3'-phosphate
  modified_base 14: mod_base = OTHER; note = 2'-O-methylcytidine-3'-phosphate
  modified_base 18: mod_base = OTHER; note = 2'-O-methyluridine-3'-phosphate
  misc_feature 1..19: note = RNA
  misc_feature 20..21: note = DNA
gcaccggtgaatccaagtgtt

SEQ ID NO: 1070 - DNA, 21 bp, Homo sapiens
  source 1..21: mol_type = unassigned DNA
  modified_base 1: mod_base = OTHER; note = 2'-O-methylcytidine-3'-phosphate
  modified_base 11: mod_base = OTHER; note = 2'-O-methylcytidine-3'-phosphate
  misc_feature 1..19: note = RNA
  misc_feature 20..21: note = DNA
cacttggattcaccggtgctt

SEQ ID NO: 1071 - DNA, 21 bp, Homo sapiens
  source 1..21: mol_type = unassigned DNA
  modified_base 1: mod_base = OTHER; note = 2'-O-methylcytidine-3'-phosphate
  modified_base 3: mod_base = OTHER; note = 2'-O-methylcytidine-3'-phosphate
  modified_base 4: mod_base = OTHER; note = 2'-O-methylcytidine-3'-phosphate
  modified_base 7: mod_base = OTHER; note = 2'-O-methyluridine-3'-phosphate
  modified_base 11: mod_base = OTHER; note = 2'-O-methyluridine-3'-phosphate
  modified_base 12: mod_base = OTHER; note = 2'-O-methylcytidine-3'-phosphate
  modified_base 13: mod_base = OTHER; note = 2'-O-methylcytidine-3'-phosphate
  modified_base 17: mod_base = OTHER; note = 2'-O-methyluridine-3'-phosphate
  modified_base 19: mod_base = OTHER; note = 2'-O-methyluridine-3'-phosphate
  misc_feature 1..19: note = RNA
  misc_feature 20..21: note = DNA
caccggtgaatccaagtgttt

SEQ ID NO: 1072 - DNA, 21 bp, Homo sapiens
  source 1..21: mol_type = unassigned DNA
  modified_base 2: mod_base = OTHER; note = 2'-O-methylcytidine-3'-phosphate
  modified_base 12: mod_base = OTHER; note = 2'-O-methylcytidine-3'-phosphate
  misc_feature 1..19: note = RNA
  misc_feature 20..21: note = DNA
acacttggattcaccggtgtt

SEQ ID NO: 1073 - DNA, 21 bp, Homo sapiens
  source 1..21: mol_type = unassigned DNA
  modified_base 1: mod_base = OTHER; note = 2'-O-methyluridine-3'-phosphate
  modified_base 3: mod_base = OTHER; note = 2'-O-methyluridine-3'-phosphate
  modified_base 6: mod_base = OTHER; note = 2'-O-methylcytidine-3'-phosphate
  modified_base 7: mod_base = OTHER; note = 2'-O-methylcytidine-3'-phosphate
  modified_base 9: mod_base = OTHER; note = 2'-O-methyluridine-3'-phosphate
  modified_base 11: mod_base = OTHER; note = 2'-O-methylcytidine-3'-phosphate
  modified_base 13: mod_base = OTHER; note = 2'-O-methyluridine-3'-phosphate
  modified_base 15: mod_base = OTHER; note = 2'-O-methyluridine-3'-phosphate
  modified_base 17: mod_base = OTHER; note = 2'-O-methyluridine-3'-phosphate
  modified_base 18: mod_base = OTHER; note = 2'-O-methyluridine-3'-phosphate
  modified_base 19: mod_base = OTHER; note = 2'-O-methylcytidine-3'-phosphate
  misc_feature 1..19: note = RNA
  misc_feature 20..21: note = DNA
tgtggccatgcatgtgttctt

SEQ ID NO: 1074 - DNA, 21 bp, Homo sapiens
  source 1..21: mol_type = unassigned DNA
  modified_base 4: mod_base = OTHER; note = 2'-O-methylcytidine-3'-phosphate
  modified_base 6: mod_base = OTHER; note = 2'-O-methylcytidine-3'-phosphate
  modified_base 10: mod_base = OTHER; note = 2'-O-methylcytidine-3'-phosphate
  modified_base 16: mod_base = OTHER; note = 2'-O-methylcytidine-3'-phosphate
  modified_base 18: mod_base = OTHER; note = 2'-O-methylcytidine-3'-phosphate
  misc_feature 1..19: note = RNA
  misc_feature 20..21: note = DNA
gaacacatgcatggccacatt

SEQ ID NO: 1075 - DNA, 21 bp, Homo sapiens
  source 1..21: mol_type = unassigned DNA
  modified_base 2: mod_base = OTHER; note = 2'-O-methyluridine-3'-phosphate
  modified_base 5: mod_base = OTHER; note = 2'-O-methylcytidine-3'-phosphate
  modified_base 6: mod_base = OTHER; note = 2'-O-methylcytidine-3'-phosphate
  modified_base 8: mod_base = OTHER; note = 2'-O-methyluridine-3'-phosphate
  modified_base 10: mod_base = OTHER; note = 2'-O-methylcytidine-3'-phosphate
  modified_base 12: mod_base = OTHER; note = 2'-O-methyluridine-3'-phosphate
  modified_base 14: mod_base = OTHER; note = 2'-O-methyluridine-3'-phosphate
  modified_base 16: mod_base = OTHER; note = 2'-O-methyluridine-3'-phosphate
  modified_base 17: mod_base = OTHER; note = 2'-O-methyluridine-3'-phosphate
  modified_base 18: mod_base = OTHER; note = 2'-O-methylcytidine-3'-phosphate
  misc_feature 1..19: note = RNA
  misc_feature 20..21: note = DNA
gtggccatgcatgtgttcatt

SEQ ID NO: 1076 - DNA, 21 bp, Homo sapiens
  source 1..21: mol_type = unassigned DNA
  modified_base 5: mod_base = OTHER; note = 2'-O-methylcytidine-3'-phosphate
  modified_base 7: mod_base = OTHER; note = 2'-O-methylcytidine-3'-phosphate
  modified_base 11: mod_base = OTHER; note = 2'-O-methylcytidine-3'-phosphate
  modified_base 17: mod_base = OTHER; note = 2'-O-methylcytidine-3'-phosphate
  misc_feature 1..19: note = RNA
  misc_feature 20..21: note = DNA
tgaacacatgcatggccactt

SEQ ID NO: 1077 - DNA, 21 bp, Homo sapiens
  source 1..21: mol_type = unassigned DNA
  modified_base 2: mod_base = OTHER; note = 2'-O-methylcytidine-3'-phosphate
  modified_base 3: mod_base = OTHER; note = 2'-O-methylcytidine-3'-phosphate
  modified_base 5: mod_base = OTHER; note = 2'-O-methyluridine-3'-phosphate
  modified_base 7: mod_base = OTHER; note = 2'-O-methylcytidine-3'-phosphate
  modified_base 9: mod_base = OTHER; note = 2'-O-methyluridine-3'-phosphate
  modified_base 11: mod_base = OTHER; note = 2'-O-methyluridine-3'-phosphate
  modified_base 13: mod_base = OTHER; note = 2'-O-methyluridine-3'-phosphate
  modified_base 14: mod_base = OTHER; note = 2'-O-methyluridine-3'-phosphate
  modified_base 15: mod_base = OTHER; note = 2'-O-methylcytidine-3'-phosphate
  misc_feature 1..19: note = RNA
  misc_feature 20..21: note = DNA
gccatgcatgtgttcagaatt

SEQ ID NO: 1078 - DNA, 21 bp, Homo sapiens
  source 1..21: mol_type = unassigned DNA
  modified_base 8: mod_base = OTHER; note = 2'-O-methylcytidine-3'-phosphate
  modified_base 10: mod_base = OTHER; note = 2'-O-methylcytidine-3'-phosphate
  modified_base 14: mod_base = OTHER; note = 2'-O-methylcytidine-3'-phosphate
  misc_feature 1..19: note = RNA
  misc_feature 20..21: note = DNA
ttctgaacacatgcatggctt

SEQ ID NO: 1079 - DNA, 21 bp, Homo sapiens
  source 1..21: mol_type = unassigned DNA
  modified_base 1: mod_base = OTHER; note = 2'-O-methyluridine-3'-phosphate
  modified_base 3: mod_base = OTHER; note = 2'-O-methyluridine-3'-phosphate
  modified_base 4: mod_base = OTHER; note = 2'-O-methyluridine-3'-phosphate
  modified_base 5: mod_base = OTHER; note = 2'-O-methylcytidine-3'-phosphate
  modified_base 6: mod_base = OTHER; note = 2'-O-methylcytidine-3'-phosphate
  modified_base 8: mod_base = OTHER; note = 2'-O-methylcytidine-3'-phosphate
  modified_base 9: mod_base = OTHER; note = 2'-O-methylcytidine-3'-phosphate
  modified_base 11: mod_base = OTHER; note = 2'-O-methylcytidine-3'-phosphate
  modified_base 14: mod_base = OTHER; note = 2'-O-methylcytidine-3'-phosphate
  modified_base 15: mod_base = OTHER; note = 2'-O-methyluridine-3'-phosphate
  modified_base 17: mod_base = OTHER; note = 2'-O-methyluridine-3'-phosphate
  modified_base 18: mod_base = OTHER; note = 2'-O-methylcytidine-3'-phosphate
  misc_feature 1..19: note = RNA
  misc_feature 20..21: note = DNA
tattccaccacggctgtcatt

SEQ ID NO: 1080 - DNA, 21 bp, Homo sapiens
  source 1..21: mol_type = unassigned DNA
  modified_base 4: mod_base = OTHER; note = 2'-O-methylcytidine-3'-phosphate
  modified_base 18: mod_base = OTHER; note = 2'-O-methyluridine-3'-phosphate
  misc_feature 1..19: note = RNA
  misc_feature 20..21: note = DNA
tgacagccgtggtggaatatt

SEQ ID NO: 1081 - DNA, 21 bp, Homo sapiens
  source 1..21: mol_type = unassigned DNA
  modified_base 2: mod_base = OTHER; note = 2'-O-methyluridine-3'-phosphate
  modified_base 3: mod_base = OTHER; note = 2'-O-methylcytidine-3'-phosphate
  modified_base 5: mod_base = OTHER; note = 2'-O-methyluridine-3'-phosphate
  modified_base 6: mod_base = OTHER; note = 2'-O-methylcytidine-3'-phosphate
  modified_base 8: mod_base = OTHER; note = 2'-O-methylcytidine-3'-phosphate
  modified_base 9: mod_base = OTHER; note = 2'-O-methylcytidine-3'-phosphate
  modified_base 12: mod_base = OTHER; note = 2'-O-methyluridine-3'-phosphate
  modified_base 13: mod_base = OTHER; note = 2'-O-methylcytidine-3'-phosphate
  modified_base 14: mod_base = OTHER; note = 2'-O-methylcytidine-3'-phosphate
  modified_base 15: mod_base = OTHER; note = 2'-O-methylcytidine-3'-phosphate
  misc_feature 1..19: note = RNA
  misc_feature 20..21: note = DNA
gtcatcaccaatcccaaggtt

SEQ ID NO: 1082 - DNA, 21 bp, Homo sapiens
  source 1..21: mol_type = unassigned DNA
  misc_feature 1..19: note = RNA
  misc_feature 20..21: note = DNA
ccttgggattggtgatgactt

SEQ ID NO: 1083 - DNA, 21 bp, Homo sapiens
  source 1..21: mol_type = unassigned DNA
  modified_base 2: mod_base = OTHER; note = 2'-O-methyluridine-3'-phosphate
  modified_base 3: mod_base = OTHER; note = 2'-O-methylcytidine-3'-phosphate
  modified_base 4: mod_base = OTHER; note = 2'-O-methylcytidine-3'-phosphate
  modified_base 5: mod_base = OTHER; note = 2'-O-methyluridine-3'-phosphate
  modified_base 6: mod_base = OTHER; note = 2'-O-methylcytidine-3'-phosphate
  modified_base 7: mod_base = OTHER; note = 2'-O-methyluridine-3'-phosphate
  modified_base 10: mod_base = OTHER; note = 2'-O-methyluridine-3'-phosphate
  modified_base 13: mod_base = OTHER; note = 2'-O-methyluridine-3'-phosphate
  modified_base 14: mod_base = OTHER; note = 2'-O-methylcytidine-3'-phosphate
  modified_base 19: mod_base = OTHER; note = 2'-O-methyluridine-3'-phosphate
  misc_feature 1..19: note = RNA
  misc_feature 20..21: note = DNA
gtcctctgatggtcaaagttt

SEQ ID NO: 1084 - DNA, 21 bp, Homo sapiens
  source 1..21: mol_type = unassigned DNA
  modified_base 9: mod_base = OTHER; note = 2'-O-methylcytidine-3'-phosphate
  modified_base 12: mod_base = OTHER; note = 2'-O-methylcytidine-3'-phosphate
  misc_feature 1..19: note = RNA
  misc_feature 20..21: note = DNA
actttgaccatcagaggactt

SEQ ID NO: 1085 - DNA, 21 bp, Homo sapiens
  source 1..21: mol_type = unassigned DNA
  modified_base 3: mod_base = OTHER; note = 2'-O-methyluridine-3'-phosphate
  modified_base 6: mod_base = OTHER; note = 2'-O-methyluridine-3'-phosphate
  modified_base 7: mod_base = OTHER; note = 2'-O-methylcytidine-3'-phosphate
  modified_base 12: mod_base = OTHER; note = 2'-O-methyluridine-3'-phosphate
  modified_base 13: mod_base = OTHER; note = 2'-O-methyluridine-3'-phosphate
  modified_base 14: mod_base = OTHER; note = 2'-O-methylcytidine-3'-phosphate
  modified_base 15: mod_base = OTHER; note = 2'-O-methyluridine-3'-phosphate
  modified_base 19: mod_base = OTHER; note = 2'-O-methyluridine-3'-phosphate
  misc_feature 1..19: note = RNA
  misc_feature 20..21: note = DNA
gatggtcaaagttctagattt

SEQ ID NO: 1086 - DNA, 21 bp, Homo sapiens
  source 1..21: mol_type = unassigned DNA
  modified_base 4: mod_base = OTHER; note = 2'-O-methyluridine-3'-phosphate
  modified_base 16: mod_base = OTHER; note = 2'-O-methylcytidine-3'-phosphate
  misc_feature 1..19: note = RNA
  misc_feature 20..21: note = DNA
atctagaactttgaccatctt

SEQ ID NO: 1087 - DNA, 21 bp, Homo sapiens
  source 1..21: mol_type = unassigned DNA
  modified_base 2: mod_base = OTHER; note = 2'-O-methyluridine-3'-phosphate
  modified_base 4: mod_base = OTHER; note = 2'-O-methylcytidine-3'-phosphate
  modified_base 5: mod_base = OTHER; note = 2'-O-methyluridine-3'-phosphate
  modified_base 7: mod_base = OTHER; note = 2'-O-methyluridine-3'-phosphate
  modified_base 8: mod_base = OTHER; note = 2'-O-methylcytidine-3'-phosphate
  modified_base 9: mod_base = OTHER; note = 2'-O-methylcytidine-3'-phosphate
  modified_base 14: mod_base = OTHER; note = 2'-O-methylcytidine-3'-phosphate
  modified_base 17: mod_base = OTHER; note = 2'-O-methyluridine-3'-phosphate
  modified_base 18: mod_base = OTHER; note = 2'-O-methylcytidine-3'-phosphate
  modified_base 19: mod_base = OTHER; note = 2'-O-methylcytidine-3'-phosphate
  misc_feature 1..19: note = RNA
  misc_feature 20..21: note = DNA
atgctgtccgaggcagtcctt

SEQ ID NO: 1088 - DNA, 21 bp, Homo sapiens
  source 1..21: mol_type = unassigned DNA
  modified_base 14: mod_base = OTHER; note = 2'-O-methylcytidine-3'-phosphate
  modified_base 17: mod_base = OTHER; note = 2'-O-methylcytidine-3'-phosphate
  misc_feature 1..19: note = RNA
  misc_feature 20..21: note = DNA
ggactgcctcggacagcattt

SEQ ID NO: 1089 - DNA, 21 bp, Homo sapiens
  source 1..21: mol_type = unassigned DNA
  modified_base 1: mod_base = OTHER; note = 2'-O-methylcytidine-3'-phosphate
  modified_base 2: mod_base = OTHER; note = 2'-O-methylcytidine-3'-phosphate
  modified_base 4: mod_base = OTHER; note = 2'-O-methyluridine-3'-phosphate
  modified_base 6: mod_base = OTHER; note = 2'-O-methylcytidine-3'-phosphate
  modified_base 8: mod_base = OTHER; note = 2'-O-methyluridine-3'-phosphate
  modified_base 10: mod_base = OTHER; note = 2'-O-methyluridine-3'-phosphate
  modified_base 12: mod_base = OTHER; note = 2'-O-methyluridine-3'-phosphate
  modified_base 13: mod_base = OTHER; note = 2'-O-methyluridine-3'-phosphate
  modified_base 14: mod_base = OTHER; note = 2'-O-methylcytidine-3'-phosphate
  misc_feature 1..19: note = RNA
  misc_feature 20..21: note = DNA
ccgtgcatgtgttcagaaatt

SEQ ID NO: 1090 - DNA, 21 bp, Homo sapiens
  source 1..21: mol_type = unassigned DNA
  modified_base 9: mod_base = OTHER; note = 2'-O-methylcytidine-3'-phosphate
  modified_base 11: mod_base = OTHER; note = 2'-O-methylcytidine-3'-phosphate
  modified_base 15: mod_base = OTHER; note = 2'-O-methylcytidine-3'-phosphate
  misc_feature 1..19: note = RNA
  misc_feature 20..21: note = DNA
tttctgaacacatgcacggtt

SEQ ID NO: 1091 - DNA, 21 bp, Homo sapiens
  source 1..21: mol_type = unassigned DNA
  modified_base 3: mod_base = OTHER; note = 2'-O-methyluridine-3'-phosphate
  modified_base 4: mod_base = OTHER; note = 2'-O-methylcytidine-3'-phosphate
  modified_base 5: mod_base = OTHER; note = 2'-O-methyluridine-3'-phosphate
  modified_base 12: mod_base = OTHER; note = 2'-O-methylcytidine-3'-phosphate
  modified_base 13: mod_base = OTHER; note = 2'-O-methyluridine-3'-phosphate
  modified_base 15: mod_base = OTHER; note = 2'-O-methylcytidine-3'-phosphate
  modified_base 17: mod_base = OTHER; note = 2'-O-methyluridine-3'-phosphate
  misc_feature 1..19: note = RNA
  misc_feature 20..21: note = DNA
agtctggagagctgcatggtt

SEQ ID NO: 1092 - DNA, 21 bp, Homo sapiens
  source 1..21: mol_type = unassigned DNA
  modified_base 2: mod_base = OTHER; note = 2'-O-methylcytidine-3'-phosphate
  modified_base 6: mod_base = OTHER; note = 2'-O-methylcytidine-3'-phosphate
  modified_base 14: mod_base = OTHER; note = 2'-O-methylcytidine-3'-phosphate
  misc_feature 1..19: note = RNA
  misc_feature 20..21: note = DNA
ccatgcagctctccagacttt

SEQ ID NO: 1093 - DNA, 21 bp, Homo sapiens
  source 1..21: mol_type = unassigned DNA
  modified_base 1: mod_base = OTHER; note = 2'-O-methylcytidine-3'-phosphate
  modified_base 3: mod_base = OTHER; note = 2'-O-methyluridine-3'-phosphate
  modified_base 7: mod_base = OTHER; note = 2'-O-methylcytidine-3'-phosphate
  modified_base 8: mod_base = OTHER; note = 2'-O-methyluridine-3'-phosphate
  modified_base 9: mod_base = OTHER; note = 2'-O-methylcytidine-3'-phosphate
  modified_base 11: mod_base = OTHER; note = 2'-O-methylcytidine-3'-phosphate
  modified_base 14: mod_base = OTHER; note = 2'-O-methylcytidine-3'-phosphate
  modified_base 15: mod_base = OTHER; note = 2'-O-methyluridine-3'-phosphate
  misc_feature 1..19: note = RNA
  misc_feature 20..21: note = DNA
catgggctcacaactgaggtt

SEQ ID NO: 1094 - DNA, 21 bp, Homo sapiens
  source 1..21: mol_type = unassigned DNA
  modified_base 4: mod_base = OTHER; note = 2'-O-methylcytidine-3'-phosphate
  modified_base 16: mod_base = OTHER; note = 2'-O-methylcytidine-3'-phosphate
  misc_feature 1..19: note = RNA
  misc_feature 20..21: note = DNA
cctcagttgtgagcccatgtt

SEQ ID NO: 1095 - DNA, 21 bp, Homo sapiens
  source 1..21: mol_type = unassigned DNA
  modified_base 1: mod_base = OTHER; note = 2'-O-methyluridine-3'-phosphate
  modified_base 2: mod_base = OTHER; note = 2'-O-methylcytidine-3'-phosphate
  modified_base 3: mod_base = OTHER; note = 2'-O-methyluridine-3'-phosphate
  modified_base 4: mod_base = OTHER; note = 2'-O-methylcytidine-3'-phosphate
  modified_base 6: mod_base = OTHER; note = 2'-O-methyluridine-3'-phosphate
  modified_base 7: mod_base = OTHER; note = 2'-O-methylcytidine-3'-phosphate
  modified_base 9: mod_base = OTHER; note = 2'-O-methyluridine-3'-phosphate
  modified_base 10: mod_base = OTHER; note = 2'-O-methylcytidine-3'-phosphate
  modified_base 11: mod_base = OTHER; note = 2'-O-methyluridine-3'-phosphate
  modified_base 13: mod_base = OTHER; note = 2'-O-methylcytidine-3'-phosphate
  modified_base 14: mod_base = OTHER; note = 2'-O-methyluridine-3'-phosphate
  modified_base 15: mod_base = OTHER; note = 2'-O-methylcytidine-3'-phosphate
  modified_base 16: mod_base = OTHER; note = 2'-O-methylcytidine-3'-phosphate
  modified_base 17: mod_base = OTHER; note = 2'-O-methyluridine-3'-phosphate
  modified_base 18: mod_base = OTHER; note = 2'-O-methylcytidine-3'-phosphate
  modified_base 19: mod_base = OTHER; note = 2'-O-methylcytidine-3'-phosphate
  misc_feature 1..19: note = RNA
  misc_feature 20..21: note = DNA
tctcatcgtctgctcctcctt

SEQ ID NO: 1096 - DNA, 21 bp, Homo sapiens
  source 1..21: mol_type = unassigned DNA
  modified_base 8: mod_base = OTHER; note = 2'-O-methylcytidine-3'-phosphate
  misc_feature 1..19: note = RNA
  misc_feature 20..21: note = DNA
ggaggagcagacgatgagatt

SEQ ID NO: 1097 - DNA, 21 bp, Homo sapiens
  source 1..21: mol_type = unassigned DNA
  modified_base 1: mod_base = OTHER; note = 2'-O-methylcytidine-3'-phosphate
  modified_base 2: mod_base = OTHER; note = 2'-O-methylcytidine-3'-phosphate
  modified_base 3: mod_base = OTHER; note = 2'-O-methylcytidine-3'-phosphate
  modified_base 4: mod_base = OTHER; note = 2'-O-methylcytidine-3'-phosphate
  modified_base 6: mod_base = OTHER; note = 2'-O-methyluridine-3'-phosphate
  modified_base 7: mod_base = OTHER; note = 2'-O-methyluridine-3'-phosphate
  modified_base 8: mod_base = OTHER; note = 2'-O-methylcytidine-3'-phosphate
  modified_base 9: mod_base = OTHER; note = 2'-O-methylcytidine-3'-phosphate
  modified_base 11: mod_base = OTHER; note = 2'-O-methyluridine-3'-phosphate
  modified_base 15: mod_base = OTHER; note = 2'-O-methylcytidine-3'-phosphate
  modified_base 17: mod_base = OTHER; note = 2'-O-methyluridine-3'-phosphate
  modified_base 19: mod_base = OTHER; note = 2'-O-methylcytidine-3'-phosphate
  misc_feature 1..19: note = RNA
  misc_feature 20..21: note = DNA
ccccattccatgagcatgctt

SEQ ID NO: 1098 - DNA, 21 bp, Homo sapiens
  source 1..21: mol_type = unassigned DNA
  modified_base 2: mod_base = OTHER; note = 2'-O-methylcytidine-3'-phosphate
  modified_base 8: mod_base = OTHER; note = 2'-O-methylcytidine-3'-phosphate
  misc_feature 1..19: note = RNA
  misc_feature 20..21: note = DNA
gcatgctcatggaatggggtt

SEQ ID NO: 1099 - DNA, 21 bp, Homo sapiens
  source 1..21: mol_type = unassigned DNA
  modified_base 2: mod_base = OTHER; note = 2'-O-methylcytidine-3'-phosphate
  modified_base 3: mod_base = OTHER; note = 2'-O-methylcytidine-3'-phosphate
  modified_base 4: mod_base = OTHER; note = 2'-O-methylcytidine-3'-phosphate
  modified_base 5: mod_base = OTHER; note = 2'-O-methylcytidine-3'-phosphate
  modified_base 6: mod_base = OTHER; note = 2'-O-methyluridine-3'-phosphate
  modified_base 8: mod_base = OTHER; note = 2'-O-methylcytidine-3'-phosphate
  modified_base 9: mod_base = OTHER; note = 2'-O-methyluridine-3'-phosphate
  modified_base 10: mod_base = OTHER; note = 2'-O-methylcytidine-3'-phosphate
  modified_base 11: mod_base = OTHER; note = 2'-O-methylcytidine-3'-phosphate
  modified_base 12: mod_base = OTHER; note = 2'-O-methyluridine-3'-phosphate
  modified_base 14: mod_base = OTHER; note = 2'-O-methyluridine-3'-phosphate
  modified_base 15: mod_base = OTHER; note = 2'-O-methyluridine-3'-phosphate
  modified_base 16: mod_base = OTHER; note = 2'-O-methylcytidine-3'-phosphate
  modified_base 17: mod_base = OTHER; note = 2'-O-methylcytidine-3'-phosphate
  modified_base 19: mod_base = OTHER; note = 2'-O-methylcytidine-3'-phosphate
  misc_feature 1..19: note = RNA
  misc_feature 20..21: note = DNA
gcccctactcctattccactt

SEQ ID NO: 1100 - DNA, 21 bp, Homo sapiens
  source 1..21: mol_type = unassigned DNA
  modified_base 7: mod_base = OTHER; note = 2'-O-methyluridine-3'-phosphate
  modified_base 13: mod_base = OTHER; note = 2'-O-methyluridine-3'-phosphate
  misc_feature 1..19: note = RNA
  misc_feature 20..21: note = DNA
gtggaataggagtaggggctt

SEQ ID NO: 1101 - DNA, 21 bp, Homo sapiens
  source 1..21: mol_type = unassigned DNA
  modified_base 1: mod_base = OTHER; note = 2'-O-methylcytidine-3'-phosphate
  modified_base 2: mod_base = OTHER; note = 2'-O-methyluridine-3'-phosphate
  modified_base 4: mod_base = OTHER; note = 2'-O-methyluridine-3'-phosphate
  modified_base 5: mod_base = OTHER; note = 2'-O-methyluridine-3'-phosphate
  modified_base 6: mod_base = OTHER; note = 2'-O-methylcytidine-3'-phosphate
  modified_base 7: mod_base = OTHER; note = 2'-O-methylcytidine-3'-phosphate
  modified_base 9: mod_base = OTHER; note = 2'-O-methylcytidine-3'-phosphate
  modified_base 10: mod_base = OTHER; note = 2'-O-methylcytidine-3'-phosphate
  modified_base 12: mod_base = OTHER; note = 2'-O-methylcytidine-3'-phosphate
  modified_base 15: mod_base = OTHER; note = 2'-O-methylcytidine-3'-phosphate
  modified_base 16: mod_base = OTHER; note = 2'-O-methyluridine-3'-phosphate
  modified_base 18: mod_base = OTHER; note = 2'-O-methyluridine-3'-phosphate
  modified_base 19: mod_base = OTHER; note = 2'-O-methylcytidine-3'-phosphate
  misc_feature 1..19: note = RNA
  misc_feature 20..21: note = DNA
ctattccaccacggctgtctt

SEQ ID NO: 1102 - DNA, 21 bp, Homo sapiens
  source 1..21: mol_type = unassigned DNA
  modified_base 3: mod_base = OTHER; note = 2'-O-methylcytidine-3'-phosphate
  modified_base 17: mod_base = OTHER; note = 2'-O-methyluridine-3'-phosphate
  misc_feature 1..19: note = RNA
  misc_feature 20..21: note = DNA
gacagccgtggtggaatagtt

SEQ ID NO: 1103 - DNA, 21 bp, Homo sapiens
  source 1..21: mol_type = unassigned DNA
  modified_base 1: mod_base = OTHER; note = 2'-O-methylcytidine-3'-phosphate
  modified_base 3: mod_base = OTHER; note = 2'-O-methylcytidine-3'-phosphate
  modified_base 6: mod_base = OTHER; note = 2'-O-methylcytidine-3'-phosphate
  modified_base 7: mod_base = OTHER; note = 2'-O-methyluridine-3'-phosphate
  modified_base 9: mod_base = OTHER; note = 2'-O-methyluridine-3'-phosphate
  modified_base 10: mod_base = OTHER; note = 2'-O-methylcytidine-3'-phosphate
  modified_base 12: mod_base = OTHER; note = 2'-O-methyluridine-3'-phosphate
  modified_base 13: mod_base = OTHER; note = 2'-O-methylcytidine-3'-phosphate
  modified_base 15: mod_base = OTHER; note = 2'-O-methylcytidine-3'-phosphate
  modified_base 16: mod_base = OTHER; note = 2'-O-methylcytidine-3'-phosphate
  modified_base 19: mod_base = OTHER; note = 2'-O-methyluridine-3'-phosphate
  misc_feature 1..19: note = RNA
  misc_feature 20..21: note = DNA
cacggctgtcgtcaccaattt

SEQ ID NO: 1104 - DNA, 21 bp, Homo sapiens
  source 1..21: mol_type = unassigned DNA
  modified_base 12: mod_base = OTHER; note = 2'-O-methylcytidine-3'-phosphate
  misc_feature 1..19: note = RNA
  misc_feature 20..21: note = DNA
attggtgacgacagccgtgtt

SEQ ID NO: 1105 - DNA, 21 bp, Homo sapiens
  source 1..21: mol_type = unassigned DNA
  modified_base 5: mod_base = OTHER; note = 2'-O-methylcytidine-3'-phosphate
  modified_base 12: mod_base = OTHER; note = 2'-O-methyluridine-3'-phosphate
  modified_base 17: mod_base = OTHER; note = 2'-O-methyluridine-3'-phosphate
  modified_base 18: mod_base = OTHER; note = 2'-O-methyluridine-3'-phosphate
  modified_base 19: mod_base = OTHER; note = 2'-O-methyluridine-3'-phosphate
  misc_feature 1..19: note = RNA
  misc_feature 20..21: note = DNA
aggacgagggatgggattttt

SEQ ID NO: 1106 - DNA, 21 bp, Homo sapiens
  source 1..21: mol_type = unassigned DNA
  modified_base 7: mod_base = OTHER; note = 2'-O-methylcytidine-3'-phosphate
  misc_feature 1..19: note = RNA
  misc_feature 20..21: note = DNA
aaatcccatccctcgtccttt

SEQ ID NO: 1107 - DNA, 21 bp, Homo sapiens
  source 1..21: mol_type = unassigned DNA
  modified_base 1: mod_base = OTHER; note = 2'-O-methyluridine-3'-phosphate
  modified_base 2: mod_base = OTHER; note = 2'-O-methylcytidine-3'-phosphate
  modified_base 4: mod_base = OTHER; note = 2'-O-methylcytidine-3'-phosphate
  modified_base 5: mod_base = OTHER; note = 2'-O-methylcytidine-3'-phosphate
  modified_base 6: mod_base = OTHER; note = 2'-O-methyluridine-3'-phosphate
  modified_base 7: mod_base = OTHER; note = 2'-O-methylcytidine-3'-phosphate
  modified_base 9: mod_base = OTHER; note = 2'-O-methyluridine-3'-phosphate
  modified_base 11: mod_base = OTHER; note = 2'-O-methyluridine-3'-phosphate
  modified_base 13: mod_base = OTHER; note = 2'-O-methylcytidine-3'-phosphate
  modified_base 14: mod_base = OTHER; note = 2'-O-methyluridine-3'-phosphate
  modified_base 16: mod_base = OTHER; note = 2'-O-methyluridine-3'-phosphate
  modified_base 18: mod_base = OTHER; note = 2'-O-methyluridine-3'-phosphate
  modified_base 19: mod_base = OTHER; note = 2'-O-methyluridine-3'-phosphate
  misc_feature 1..19: note = RNA
  misc_feature 20..21: note = DNA
tcacctcatatgctatgtttt

SEQ ID NO: 1108 - DNA, 21 bp, Homo sapiens
  source 1..21: mol_type = unassigned DNA
  modified_base 3: mod_base = OTHER; note = 2'-O-methylcytidine-3'-phosphate
  modified_base 5: mod_base = OTHER; note = 2'-O-methyluridine-3'-phosphate
  modified_base 8: mod_base = OTHER; note = 2'-O-methylcytidine-3'-phosphate
  modified_base 10: mod_base = OTHER; note = 2'-O-methyluridine-3'-phosphate
  misc_feature 1..19: note = RNA
  misc_feature 20..21: note = DNA
aacatagcatatgaggtgatt

SEQ ID NO: 1109 - DNA, 21 bp, Homo sapiens
  source 1..21: mol_type = unassigned DNA
  modified_base 1: mod_base = OTHER; note = 2'-O-methylcytidine-3'-phosphate
  modified_base 2: mod_base = OTHER; note = 2'-O-methylcytidine-3'-phosphate
  modified_base 3: mod_base = OTHER; note = 2'-O-methyluridine-3'-phosphate
  modified_base 4: mod_base = OTHER; note = 2'-O-methylcytidine-3'-phosphate
  modified_base 6: mod_base = OTHER; note = 2'-O-methyluridine-3'-phosphate
  modified_base 8: mod_base = OTHER; note = 2'-O-methyluridine-3'-phosphate
  modified_base 10: mod_base = OTHER; note = 2'-O-methylcytidine-3'-phosphate
  modified_base 11: mod_base = OTHER; note = 2'-O-methyluridine-3'-phosphate
  modified_base 13: mod_base = OTHER; note = 2'-O-methyluridine-3'-phosphate
  modified_base 15: mod_base = OTHER; note = 2'-O-methyluridine-3'-phosphate
  modified_base 16: mod_base = OTHER; note = 2'-O-methyluridine-3'-phosphate
  misc_feature 1..19: note = RNA
  misc_feature 20..21: note = DNA
cctcatatgctatgttagatt

SEQ ID NO: 1110 - DNA, 21 bp, Homo sapiens
  source 1..21: mol_type = unassigned DNA
  modified_base 3: mod_base = OTHER; note = 2'-O-methyluridine-3'-phosphate
  modified_base 6: mod_base = OTHER; note = 2'-O-methylcytidine-3'-phosphate
  modified_base 8: mod_base = OTHER; note = 2'-O-methyluridine-3'-phosphate
  modified_base 11: mod_base = OTHER; note = 2'-O-methylcytidine-3'-phosphate
  modified_base 13: mod_base = OTHER; note = 2'-O-methyluridine-3'-phosphate
  misc_feature 1..19: note = RNA
  misc_feature 20..21: note = DNA
tctaacatagcatatgaggtt

SEQ ID NO: 1111 - DNA, 21 bp, Homo sapiens
  source 1..21: mol_type = unassigned DNA
  modified_base 2: mod_base = OTHER; note = 2'-O-methyluridine-3'-phosphate
  modified_base 4: mod_base = OTHER; note = 2'-O-methyluridine-3'-phosphate
  modified_base 5: mod_base = OTHER; note = 2'-O-methyluridine-3'-phosphate
  modified_base 11: mod_base = OTHER; note = 2'-O-methyluridine-3'-phosphate
  modified_base 12: mod_base = OTHER; note = 2'-O-methylcytidine-3'-phosphate
  modified_base 13: mod_base = OTHER; note = 2'-O-methylcytidine-3'-phosphate
  modified_base 17: mod_base = OTHER; note = 2'-O-methylcytidine-3'-phosphate
  misc_feature 1..19: note = RNA
  misc_feature 20..21: note = DNA
atgttagaagtccaggcagtt

SEQ ID NO: 1112 - DNA, 21 bp, Homo sapiens
  source 1..21: mol_type = unassigned DNA
  modified_base 14: mod_base = OTHER; note = 2'-O-methyluridine-3'-phosphate
  modified_base 17: mod_base = OTHER; note = 2'-O-methylcytidine-3'-phosphate
  misc_feature 1..19: note = RNA
  misc_feature 20..21: note = DNA
ctgcctggacttctaacattt

SEQ ID NO: 1113 - DNA, 21 bp, Homo sapiens
  source 1..21: mol_type = unassigned DNA
  modified_base 1: mod_base = OTHER; note = 2'-O-methyluridine-3'-phosphate
  modified_base 2: mod_base = OTHER; note = 2'-O-methylcytidine-3'-phosphate
  modified_base 3: mod_base = OTHER; note = 2'-O-methyluridine-3'-phosphate
  modified_base 8: mod_base = OTHER; note = 2'-O-methylcytidine-3'-phosphate
  modified_base 9: mod_base = OTHER; note = 2'-O-methyluridine-3'-phosphate
  modified_base 12: mod_base = OTHER; note = 2'-O-methylcytidine-3'-phosphate
  modified_base 13: mod_base = OTHER; note = 2'-O-methylcytidine-3'-phosphate
  modified_base 14: mod_base = OTHER; note = 2'-O-methylcytidine-3'-phosphate
  modified_base 15: mod_base = OTHER; note = 2'-O-methyluridine-3'-phosphate
  modified_base 17: mod_base = OTHER; note = 2'-O-methylcytidine-3'-phosphate
  misc_feature 1..19: note = RNA
  misc_feature 20..21: note = DNA
tctgaggctggccctacggtt

SEQ ID NO: 1114 - DNA, 21 bp, Homo sapiens
  source 1..21: mol_type = unassigned DNA
  modified_base 4: mod_base = OTHER; note = 2'-O-methyluridine-3'-phosphate
  modified_base 10: mod_base = OTHER; note = 2'-O-methylcytidine-3'-phosphate
  modified_base 16: mod_base = OTHER; note = 2'-O-methylcytidine-3'-phosphate
  misc_feature 1..19: note = RNA
  misc_feature 20..21: note = DNA
ccgtagggccagcctcagatt

SEQ ID NO: 1115 - DNA, 21 bp, Homo sapiens
  source 1..21: mol_type = unassigned DNA
  modified_base 3: mod_base = OTHER; note = 2'-O-methylcytidine-3'-phosphate
  modified_base 4: mod_base = OTHER; note = 2'-O-methylcytidine-3'-phosphate
  modified_base 5: mod_base = OTHER; note = 2'-O-methylcytidine-3'-phosphate
  modified_base 6: mod_base = OTHER; note = 2'-O-methyluridine-3'-phosphate
  modified_base 8: mod_base = OTHER; note = 2'-O-methylcytidine-3'-phosphate
  modified_base 12: mod_base = OTHER; note = 2'-O-methylcytidine-3'-phosphate
  modified_base 14: mod_base = OTHER; note = 2'-O-methylcytidine-3'-phosphate
  modified_base 15: mod_base = OTHER; note = 2'-O-methylcytidine-3'-phosphate
  modified_base 18: mod_base = OTHER; note = 2'-O-methyluridine-3'-phosphate
  misc_feature 1..19: note = RNA
  misc_feature 20..21: note = DNA
ggccctacgggcaccggtgtt

SEQ ID NO: 1116 - DNA, 21 bp, Homo sapiens
  source 1..21: mol_type = unassigned DNA
  modified_base 1: mod_base = OTHER; note = 2'-O-methylcytidine-3'-phosphate
  modified_base 13: mod_base = OTHER; note = 2'-O-methyluridine-3'-phosphate
  misc_feature 1..19: note = RNA
  misc_feature 20..21: note = DNA
caccggtgcccgtagggcctt

SEQ ID NO: 1117 - DNA, 21 bp, Homo sapiens
  source 1..21: mol_type = unassigned DNA
  modified_base 4: mod_base = OTHER; note = 2'-O-methylcytidine-3'-phosphate
  modified_base 6: mod_base = OTHER; note = 2'-O-methylcytidine-3'-phosphate
  modified_base 7: mod_base = OTHER; note = 2'-O-methylcytidine-3'-phosphate
  modified_base 10: mod_base = OTHER; note = 2'-O-methyluridine-3'-phosphate
  modified_base 14: mod_base = OTHER; note = 2'-O-methyluridine-3'-phosphate
  modified_base 15: mod_base = OTHER; note = 2'-O-methylcytidine-3'-phosphate
  modified_base 16: mod_base = OTHER; note = 2'-O-methylcytidine-3'-phosphate
  misc_feature 1..19: note = RNA
  misc_feature 20..21: note = DNA
gggcaccggtgaatccaagtt

SEQ ID NO: 1118 - DNA, 21 bp, Homo sapiens
  source 1..21: mol_type = unassigned DNA
  modified_base 9: mod_base = OTHER; note = 2'-O-methylcytidine-3'-phosphate
  misc_feature 1..19: note = RNA
  misc_feature 20..21: note = DNA
cttggattcaccggtgccctt

SEQ ID NO: 1119 - DNA, 21 bp, Homo sapiens
  source 1..21: mol_type = unassigned DNA
  modified_base 1: mod_base = OTHER; note = 2'-O-methylcytidine-3'-phosphate
  modified_base 2: mod_base = OTHER; note = 2'-O-methylcytidine-3'-phosphate
  modified_base 4: mod_base = OTHER; note = 2'-O-methyluridine-3'-phosphate
  modified_base 6: mod_base = OTHER; note = 2'-O-methylcytidine-3'-phosphate
  modified_base 8: mod_base = OTHER; note = 2'-O-methyluridine-3'-phosphate
  modified_base 10: mod_base = OTHER; note = 2'-O-methyluridine-3'-phosphate
  modified_base 12: mod_base = OTHER; note = 2'-O-methyluridine-3'-phosphate
  modified_base 13: mod_base = OTHER; note = 2'-O-methyluridine-3'-phosphate
  modified_base 14: mod_base = OTHER; note = 2'-O-methylcytidine-3'-phosphate
  misc_feature 1..19: note = RNA
  misc_feature 20..21: note = DNA
ccatgcatgtgttcagaaatt

SEQ ID NO: 1120 - DNA, 21 bp, Homo sapiens
  source 1..21: mol_type = unassigned DNA
  modified_base 9: mod_base = OTHER; note = 2'-O-methylcytidine-3'-phosphate
  modified_base 11: mod_base = OTHER; note = 2'-O-methylcytidine-3'-phosphate
  modified_base 15: mod_base = OTHER; note = 2'-O-methylcytidine-3'-phosphate
  misc_feature 1..19: note = RNA
  misc_feature 20..21: note = DNA
tttctgaacacatgcatggtt

SEQ ID NO: 1121 - RNA, 19 nt, Rattus norvegicus
  source 1..19: mol_type = unassigned RNA
gtcctctgatggtcaaagt

SEQ ID NO: 1122 - RNA, 19 nt, Rattus norvegicus
  source 1..19: mol_type = unassigned RNA
actttgaccatcagaggac

SEQ ID NO: 1123 - RNA, 19 nt, Rattus norvegicus
  source 1..19: mol_type = unassigned RNA
ttcttgctctataaaccgt

SEQ ID NO: 1124 - RNA, 19 nt, Rattus norvegicus
  source 1..19: mol_type = unassigned RNA
acggtttatagagcaagaa

SEQ ID NO: 1125 - RNA, 19 nt, Rattus norvegicus
  source 1..19: mol_type = unassigned RNA
ctctataaaccgtgttagc

SEQ ID NO: 1126 - RNA, 19 nt, Rattus norvegicus
  source 1..19: mol_type = unassigned RNA
gctaacacggtttatagag

SEQ ID NO: 1127 - RNA, 19 nt, Rattus norvegicus
  source 1..19: mol_type = unassigned RNA
tcgccactacaccatcgca

SEQ ID NO: 1128 - RNA, 19 nt, Rattus norvegicus
  source 1..19: mol_type = unassigned RNA
tgcgatggtgtagtggcga

SEQ ID NO: 1129 - RNA, 19 nt, Rattus norvegicus
  source 1..19: mol_type = unassigned RNA
tcttgctctataaaccgtg

SEQ ID NO: 1130 - RNA, 19 nt, Rattus norvegicus
  source 1..19: mol_type = unassigned RNA
cacggtttatagagcaaga

SEQ ID NO: 1131 - RNA, 19 nt, Rattus norvegicus
  source 1..19: mol_type = unassigned RNA
tgctctataaaccgtgtta

SEQ ID NO: 1132 - RNA, 19 nt, Rattus norvegicus
  source 1..19: mol_type = unassigned RNA
taacacggtttatagagca

SEQ ID NO: 1133 - RNA, 19 nt, Rattus norvegicus
  source 1..19: mol_type = unassigned RNA
cagtgttcttgctctataa

SEQ ID NO: 1134 - RNA, 19 nt, Rattus norvegicus
  source 1..19: mol_type = unassigned RNA
ttatagagcaagaacactg

SEQ ID NO: 1135 - RNA, 19 nt, Rattus norvegicus
  source 1..19: mol_type = unassigned RNA
gctctataaaccgtgttag

SEQ ID NO: 1136 - RNA, 19 nt, Rattus norvegicus
  source 1..19: mol_type = unassigned RNA
ctaacacggtttatagagc

SEQ ID NO: 1137 - RNA, 19 nt, Rattus norvegicus
  source 1..19: mol_type = unassigned RNA
cctggatgctgtccgaggc

SEQ ID NO: 1138 - RNA, 19 nt, Rattus norvegicus
  source 1..19: mol_type = unassigned RNA
gcctcggacagcatccagg

SEQ ID NO: 1139 - RNA, 19 nt, Rattus norvegicus
  source 1..19: mol_type = unassigned RNA
tctgatggtcaaagtcctg

SEQ ID NO: 1140 - RNA, 19 nt, Rattus norvegicus
  source 1..19: mol_type = unassigned RNA
caggactttgaccatcaga

SEQ ID NO: 1141 - RNA, 19 nt, Rattus norvegicus
  source 1..19: mol_type = unassigned RNA
ctggagagctgcacgggct

SEQ ID NO: 1142 - RNA, 19 nt, Rattus norvegicus
  source 1..19: mol_type = unassigned RNA
agcccgtgcagctctccag

SEQ ID NO: 1143 - RNA, 19 nt, Rattus norvegicus
  source 1..19: mol_type = unassigned RNA
tctataaaccgtgttagca

SEQ ID NO: 1144 - RNA, 19 nt, Rattus norvegicus
  source 1..19: mol_type = unassigned RNA
tgctaacacggtttataga

SEQ ID NO: 1145 - RNA, 19 nt, Rattus norvegicus
  source 1..19: mol_type = unassigned RNA
aacagtgttcttgctctat

SEQ ID NO: 1146 - RNA, 19 nt, Rattus norvegicus
  source 1..19: mol_type = unassigned RNA
atagagcaagaacactgtt

SEQ ID NO: 1147 - RNA, 19 nt, Rattus norvegicus
  source 1..19: mol_type = unassigned RNA
ctctgatggtcaaagtcct

SEQ ID NO: 1148 - RNA, 19 nt, Rattus norvegicus
  source 1..19: mol_type = unassigned RNA
aggactttgaccatcagag

SEQ ID NO: 1149 - RNA, 19 nt, Rattus norvegicus
  source 1..19: mol_type = unassigned RNA
tgctgtccgaggcagccct

SEQ ID NO: 1150 - RNA, 19 nt, Rattus norvegicus
  source 1..19: mol_type = unassigned RNA
agggctgcctcggacagca

SEQ ID NO: 1151 - RNA, 19 nt, Rattus norvegicus
  source 1..19: mol_type = unassigned RNA
gtctggagagctgcacggg

SEQ ID NO: 1152 - RNA, 19 nt, Rattus norvegicus
  source 1..19: mol_type = unassigned RNA
cccgtgcagctctccagac

SEQ ID NO: 1153 - RNA, 19 nt, Rattus norvegicus
  source 1..19: mol_type = unassigned RNA
acagtgttcttgctctata

SEQ ID NO: 1154 - RNA, 19 nt, Rattus norvegicus
  source 1..19: mol_type = unassigned RNA
tatagagcaagaacactgt

SEQ ID NO: 1155 - RNA, 19 nt, Rattus norvegicus
  source 1..19: mol_type = unassigned RNA
cctctgatggtcaaagtcc

SEQ ID NO: 1156 - RNA, 19 nt, Rattus norvegicus
  source 1..19: mol_type = unassigned RNA
ggactttgaccatcagagg

SEQ ID NO: 1157 - RNA, 19 nt, Rattus norvegicus
  source 1..19: mol_type = unassigned RNA
agtcctggatgctgtccga

SEQ ID NO: 1158 - RNA, 19 nt, Rattus norvegicus
  source 1..19: mol_type = unassigned RNA
tcggacagcatccaggact

SEQ ID NO: 1159 - RNA, 19 nt, Rattus norvegicus
  source 1..19: mol_type = unassigned RNA
ttgcctctgggaagaccgc

SEQ ID NO: 1160 - RNA, 19 nt, Rattus norvegicus
  source 1..19: mol_type = unassigned RNA
gcggtcttcccagaggcaa

SEQ ID NO: 1161 - RNA, 19 nt, Rattus norvegicus
  source 1..19: mol_type = unassigned RNA
tggagagctgcacgggctc

SEQ ID NO: 1162 - RNA, 19 nt, Rattus norvegicus
  source 1..19: mol_type = unassigned RNA
gagcccgtgcagctctcca

SEQ ID NO: 1163 - RNA, 19 nt, Rattus norvegicus
  source 1..19: mol_type = unassigned RNA
gagagctgcacgggctcac

SEQ ID NO: 1164 - RNA, 19 nt, Rattus norvegicus
  source 1..19: mol_type = unassigned RNA
gtgagcccgtgcagctctc

SEQ ID NO: 1165 - RNA, 19 nt, Rattus norvegicus
  source 1..19: mol_type = unassigned RNA
gagctgcacgggctcacca

SEQ ID NO: 1166 - RNA, 19 nt, Rattus norvegicus
  source 1..19: mol_type = unassigned RNA
tggtgagcccgtgcagctc

SEQ ID NO: 1167 - RNA, 19 nt, Rattus norvegicus
  source 1..19: mol_type = unassigned RNA
tacaccatcgcagccctgc

SEQ ID NO: 1168 - RNA, 19 nt, Rattus norvegicus
  source 1..19: mol_type = unassigned RNA
gcagggctgcgatggtgta

SEQ ID NO: 1169 - RNA, 19 nt, Rattus norvegicus
  source 1..19: mol_type = unassigned RNA
gtcctggatgctgtccgag

SEQ ID NO: 1170 - RNA, 19 nt, Rattus norvegicus
  source 1..19: mol_type = unassigned RNA
ctcggacagcatccaggac

SEQ ID NO: 1171 - RNA, 19 nt, Rattus norvegicus
  source 1..19: mol_type = unassigned RNA
agagctgcacgggctcacc

SEQ ID NO: 1172 - RNA, 19 nt, Rattus norvegicus
  source 1..19: mol_type = unassigned RNA
ggtgagcccgtgcagctct

SEQ ID NO: 1173 - RNA, 21 nt, Rattus norvegicus
  source 1..21: mol_type = unassigned RNA
  misc_difference 20: note = modified_base - a, c, t, g, unknown or other - adenine, cytosine, thymine, or guanine
  misc_difference 21: note = modified_base - a, c, t, g, unknown or other - adenine, cytosine, thymine, or guanine
gtcctctgatggtcaaagtnn

SEQ ID NO: 1174 - RNA, 21 nt, Rattus norvegicus
  source 1..21: mol_type = unassigned RNA
  misc_difference 20: note = modified_base - a, c, t, g, unknown or other - adenine, cytosine, thymine, or guanine
  misc_difference 21: note = modified_base - a, c, t, g, unknown or other - adenine, cytosine, thymine, or guanine
actttgaccatcagaggacnn

SEQ ID NO: 1175 - RNA, 21 nt, Rattus norvegicus
  source 1..21: mol_type = unassigned RNA
  misc_difference 20: note = modified_base - a, c, t, g, unknown or other - adenine, cytosine, thymine, or guanine
  misc_difference 21: note = modified_base - a, c, t, g, unknown or other - adenine, cytosine, thymine, or guanine
ttcttgctctataaaccgtnn

SEQ ID NO: 1176 - RNA, 21 nt, Rattus norvegicus
  source 1..21: mol_type = unassigned RNA
  misc_difference 20: note = modified_base - a, c, t, g, unknown or other - adenine, cytosine, thymine, or guanine
  misc_difference 21: note = modified_base - a, c, t, g, unknown or other - adenine, cytosine, thymine, or guanine
acggtttatagagcaagaann

SEQ ID NO: 1177 - RNA, 21 nt, Rattus norvegicus
  source 1..21: mol_type = unassigned RNA
  misc_difference 20: note = modified_base - a, c, t, g, unknown or other - adenine, cytosine, thymine, or guanine
  misc_difference 21: note = modified_base - a, c, t, g, unknown or other - adenine, cytosine, thymine, or guanine
ctctataaaccgtgttagcnn

SEQ ID NO: 1178 - RNA, 21 nt, Rattus norvegicus
  source 1..21: mol_type = unassigned RNA
  misc_difference 20: note = modified_base - a, c, t, g, unknown or other - adenine, cytosine, thymine, or guanine
  misc_difference 21: note = modified_base - a, c, t, g, unknown or other - adenine, cytosine, thymine, or guanine
gctaacacggtttatagagnn

SEQ ID NO: 1179 - RNA, 21 nt, Rattus norvegicus
  source 1..21: mol_type = unassigned RNA
  misc_difference 20: note = modified_base - a, c, t, g, unknown or other - adenine, cytosine, thymine, or guanine
  misc_difference 21: note = modified_base - a, c, t, g, unknown or other - adenine, cytosine, thymine, or guanine
tcgccactacaccatcgcann

SEQ ID NO: 1180 - RNA, 21 nt, Rattus norvegicus
  source 1..21: mol_type = unassigned RNA
  misc_difference 20: note = modified_base - a, c, t, g, unknown or other - adenine, cytosine, thymine, or guanine
  misc_difference 21: note = modified_base - a, c, t, g, unknown or other - adenine, cytosine, thymine, or guanine
tgcgatggtgtagtggcgann

SEQ ID NO: 1181 - RNA, 21 nt, Rattus norvegicus
  source 1..21: mol_type = unassigned RNA
  misc_difference 20: note = modified_base - a, c, t, g, unknown or other - adenine, cytosine, thymine, or guanine
  misc_difference 21: note = modified_base - a, c, t, g, unknown or other - adenine, cytosine, thymine, or guanine
tcttgctctataaaccgtgnn

SEQ ID NO: 1182 - RNA, 21 nt, Rattus norvegicus
  source 1..21: mol_type = unassigned RNA
  misc_difference 20: note = modified_base - a, c, t, g, unknown or other - adenine, cytosine, thymine, or guanine
  misc_difference 21: note = modified_base - a, c, t, g, unknown or other - adenine, cytosine, thymine, or guanine
cacggtttatagagcaagann

SEQ ID NO: 1183 - RNA, 21 nt, Rattus norvegicus
  source 1..21: mol_type = unassigned RNA
  misc_difference 20: note = modified_base - a, c, t, g, unknown or other - adenine, cytosine, thymine, or guanine
  misc_difference 21: note = modified_base - a, c, t, g, unknown or other - adenine, cytosine, thymine, or guanine
tgctctataaaccgtgttann

SEQ ID NO: 1184 - RNA, 21 nt, Rattus norvegicus
  source 1..21: mol_type = unassigned RNA
  misc_difference 20: note = modified_base - a, c, t, g, unknown or other - adenine, cytosine, thymine, or guanine
  misc_difference 21: note = modified_base - a, c, t, g, unknown or other - adenine, cytosine, thymine, or guanine
taacacggtttatagagcann

SEQ ID NO: 1185 - RNA, 21 nt, Rattus norvegicus
  source 1..21: mol_type = unassigned RNA
  misc_difference 20: note = modified_base - a, c, t, g, unknown or other - adenine, cytosine, thymine, or guanine
  misc_difference 21: note = modified_base - a, c, t, g, unknown or other - adenine, cytosine, thymine, or guanine
cagtgttcttgctctataann

SEQ ID NO: 1186 - RNA, 21 nt, Rattus norvegicus
  source 1..21: mol_type = unassigned RNA
  misc_difference 20: note = modified_base - a, c, t, g, unknown or other - adenine, cytosine, thymine, or guanine
  misc_difference 21: note = modified_base - a, c, t, g, unknown or other - adenine, cytosine, thymine, or guanine
ttatagagcaagaacactgnn

SEQ ID NO: 1187 - RNA, 21 nt, Rattus norvegicus
  source 1..21: mol_type = unassigned RNA
  misc_difference 20: note = modified_base - a, c, t, g, unknown or other - adenine, cytosine, thymine, or guanine
  misc_difference 21: note = modified_base - a, c, t, g, unknown or other - adenine, cytosine, thymine, or guanine
gctctataaaccgtgttagnn

SEQ ID NO: 1188 - RNA, 21 nt, Rattus norvegicus
  source 1..21: mol_type = unassigned RNA
  misc_difference 20: note = modified_base - a, c, t, g, unknown or other - adenine, cytosine, thymine, or guanine
  misc_difference 21: note = modified_base - a, c, t, g, unknown or other - adenine, cytosine, thymine, or guanine
ctaacacggtttatagagcnn

SEQ ID NO: 1189 - RNA, 21 nt, Rattus norvegicus
  source 1..21: mol_type = unassigned RNA
  misc_difference 20: note = modified_base - a, c, t, g, unknown or other - adenine, cytosine, thymine, or guanine
  misc_difference 21: note = modified_base - a, c, t, g, unknown or other - adenine, cytosine, thymine, or guanine
cctggatgctgtccgaggcnn

SEQ ID NO: 1190 - RNA, 21 nt, Rattus norvegicus
  source 1..21: mol_type = unassigned RNA
  misc_difference 20: note = modified_base - a, c, t, g, unknown or other - adenine, cytosine, thymine, or guanine
  misc_difference 21: note = modified_base - a, c, t, g, unknown or other - adenine, cytosine, thymine, or guanine
gcctcggacagcatccaggnn

SEQ ID NO: 1191 - RNA, 21 nt, Rattus norvegicus
  source 1..21: mol_type = unassigned RNA
  misc_difference 20: note = modified_base - a, c, t, g, unknown or other - adenine, cytosine, thymine, or guanine
  misc_difference 21: note = modified_base - a, c, t, g, unknown or other - adenine, cytosine, thymine, or guanine
tctgatggtcaaagtcctgnn

SEQ ID NO: 1192 - RNA, 21 nt, Rattus norvegicus
  source 1..21: mol_type = unassigned RNA
  misc_difference 20: note = modified_base - a, c, t, g, unknown or other - adenine, cytosine, thymine, or guanine
  misc_difference 21: note = modified_base - a, c, t, g, unknown or other - adenine, cytosine, thymine, or guanine
caggactttgaccatcagann

SEQ ID NO: 1193 - RNA, 21 nt, Rattus norvegicus
  source 1..21: mol_type = unassigned RNA
  misc_difference 20: note = modified_base - a, c, t, g, unknown or other - adenine, cytosine, thymine, or guanine
  misc_difference 21: note = modified_base - a, c, t, g, unknown or other - adenine, cytosine, thymine, or guanine
ctggagagctgcacgggctnn

SEQ ID NO: 1194 - RNA, 21 nt, Rattus norvegicus
  source 1..21: mol_type = unassigned RNA
  misc_difference 20: note = modified_base - a, c, t, g, unknown or other - adenine, cytosine, thymine, or guanine
  misc_difference 21: note = modified_base - a, c, t, g, unknown or other - adenine, cytosine, thymine, or guanine
agcccgtgcagctctccagnn

SEQ ID NO: 1195 - RNA, 21 nt, Rattus norvegicus
  source 1..21: mol_type = unassigned RNA
  misc_difference 20: note = modified_base - a, c, t, g, unknown or other - adenine, cytosine, thymine, or guanine
  misc_difference 21: note = modified_base - a, c, t, g, unknown or other - adenine, cytosine, thymine, or guanine
tctataaaccgtgttagcann

SEQ ID NO: 1196 - RNA, 21 nt, Rattus norvegicus
  source 1..21: mol_type = unassigned RNA
  misc_difference 20: note = modified_base - a, c, t, g, unknown or other - adenine, cytosine, thymine, or guanine
  misc_difference 21: note = modified_base - a, c, t, g, unknown or other - adenine, cytosine, thymine, or guanine
tgctaacacggtttatagann

SEQ ID NO: 1197 - RNA, 21 nt, Rattus norvegicus
  source 1..21: mol_type = unassigned RNA
  misc_difference 20: note = modified_base - a, c, t, g, unknown or other - adenine, cytosine, thymine, or guanine
  misc_difference 21: note = modified_base - a, c, t, g, unknown or other - adenine, cytosine, thymine, or guanine
aacagtgttcttgctctatnn

SEQ ID NO: 1198 - RNA, 21 nt, Rattus norvegicus
  source 1..21: mol_type = unassigned RNA
  misc_difference 20: note = modified_base - a, c, t, g, unknown or other - adenine, cytosine, thymine, or guanine
  misc_difference 21: note = modified_base - a, c, t, g, unknown or other - adenine, cytosine, thymine, or guanine
atagagcaagaacactgttnn

SEQ ID NO: 1199 - RNA, 21 nt, Rattus norvegicus
  source 1..21: mol_type = unassigned RNA
  misc_difference 20: note = modified_base - a, c, t, g, unknown or other - adenine, cytosine, thymine, or guanine
  misc_difference 21: note = modified_base - a, c, t, g, unknown or other - adenine, cytosine, thymine, or guanine
ctctgatggtcaaagtcctnn

SEQ ID NO: 1200 - RNA, 21 nt, Rattus norvegicus
  source 1..21: mol_type = unassigned RNA
  misc_difference 20: note = modified_base - a, c, t, g, unknown or other - adenine, cytosine, thymine, or guanine
  misc_difference 21: note = modified_base - a, c, t, g, unknown or other - adenine, cytosine, thymine, or guanine
aggactttgaccatcagagnn

SEQ ID NO: 1201 - RNA, 21 nt, Rattus norvegicus
  source 1..21: mol_type = unassigned RNA
  misc_difference 20: note = modified_base - a, c, t, g, unknown or other - adenine, cytosine, thymine, or guanine
  misc_difference 21: note = modified_base - a, c, t, g, unknown or other - adenine, cytosine, thymine, or guanine
tgctgtccgaggcagccctnn

SEQ ID NO: 1202 - RNA, 21 nt, Rattus norvegicus
  source 1..21: mol_type = unassigned RNA
  misc_difference 20: note = modified_base - a, c, t, g, unknown or other - adenine, cytosine, thymine, or guanine
  misc_difference 21: note = modified_base - a, c, t, g, unknown or other - adenine, cytosine, thymine, or guanine
agggctgcctcggacagcann

SEQ ID NO: 1203 - RNA, 21 nt, Rattus norvegicus
  source 1..21: mol_type = unassigned RNA
  misc_difference 20: note = modified_base - a, c, t, g, unknown or other - adenine, cytosine, thymine, or guanine
  misc_difference 21: note = modified_base - a, c, t, g, unknown or other - adenine, cytosine, thymine, or guanine
gtctggagagctgcacgggnn

SEQ ID NO: 1204 - RNA, 21 nt, Rattus norvegicus
  source 1..21: mol_type = unassigned RNA
  misc_difference 20: note = modified_base - a, c, t, g, unknown or other - adenine, cytosine, thymine, or guanine
  misc_difference 21: note = modified_base - a, c, t, g, unknown or other - adenine, cytosine, thymine, or guanine
cccgtgcagctctccagacnn

SEQ ID NO: 1205 - RNA, 21 nt, Rattus norvegicus
  source 1..21: mol_type = unassigned RNA
  misc_difference 20: note = modified_base - a, c, t, g, unknown or other - adenine, cytosine, thymine, or guanine
  misc_difference 21: note = modified_base - a, c, t, g, unknown or other - adenine, cytosine, thymine, or guanine
acagtgttcttgctctatann

SEQ ID NO: 1206 - RNA, 21 nt, Rattus norvegicus
  source 1..21: mol_type = unassigned RNA
  misc_difference 20: note = modified_base - a, c, t, g, unknown or other - adenine, cytosine, thymine, or guanine
  misc_difference 21: note = modified_base - a, c, t, g, unknown or other - adenine, cytosine, thymine, or guanine
tatagagcaagaacactgtnn

SEQ ID NO: 1207 - RNA, 21 nt, Rattus norvegicus
  source 1..21: mol_type = unassigned RNA
  misc_difference 20: note = modified_base - a, c, t, g, unknown or other - adenine, cytosine, thymine, or guanine
  misc_difference 21: note = modified_base - a, c, t, g, unknown or other - adenine, cytosine, thymine, or guanine
cctctgatggtcaaagtccnn

SEQ ID NO: 1208 - RNA, 21 nt, Rattus norvegicus
  source 1..21: mol_type = unassigned RNA
  misc_difference 20: note = modified_base - a, c, t, g, unknown or other - adenine, cytosine, thymine, or guanine
  misc_difference 21: note = modified_base - a, c, t, g, unknown or other - adenine, cytosine, thymine, or guanine
ggactttgaccatcagaggnn

SEQ ID NO: 1209 - RNA, 21 nt, Rattus norvegicus
  source 1..21: mol_type = unassigned RNA
  misc_difference 20: note = modified_base - a, c, t, g, unknown or other - adenine, cytosine, thymine, or guanine
  misc_difference 21: note = modified_base - a, c, t, g, unknown or other - adenine, cytosine, thymine, or guanine
agtcctggatgctgtccgann

SEQ ID NO: 1210 - RNA, 21 nt, Rattus norvegicus
  source 1..21: mol_type = unassigned RNA
  misc_difference 20: note = modified_base - a, c, t, g, unknown or other - adenine, cytosine, thymine, or guanine
  misc_difference 21: note = modified_base - a, c, t, g, unknown or other - adenine, cytosine, thymine, or guanine
tcggacagcatccaggactnn

SEQ ID NO: 1211 - RNA, 21 nt, Rattus norvegicus
  source 1..21: mol_type = unassigned RNA
  misc_difference 20: note = modified_base - a, c, t, g, unknown or other - adenine, cytosine, thymine, or guanine
  misc_difference 21: note = modified_base - a, c, t, g, unknown or other - adenine, cytosine, thymine, or guanine
ttgcctctgggaagaccgcnn

SEQ ID NO: 1212 - RNA, 21 nt, Rattus norvegicus
  source 1..21: mol_type = unassigned RNA
  misc_difference 20: note = modified_base - a, c, t, g, unknown or other - adenine, cytosine, thymine, or guanine
  misc_difference 21: note = modified_base - a, c, t, g, unknown or other - adenine, cytosine, thymine, or guanine
gcggtcttcccagaggcaann

SEQ ID NO: 1213 - RNA, 21 nt, Rattus norvegicus
  source 1..21: mol_type = unassigned RNA
  misc_difference 20: note = modified_base - a, c, t, g, unknown or other - adenine, cytosine, thymine, or guanine
  misc_difference 21: note = modified_base - a, c, t, g, unknown or other - adenine, cytosine, thymine, or guanine
tggagagctgcacgggctcnn

SEQ ID NO: 1214 - RNA, 21 nt, Rattus norvegicus
  source 1..21: mol_type = unassigned RNA
  misc_difference 20: note = modified_base - a, c, t, g, unknown or other - adenine, cytosine, thymine, or guanine
  misc_difference 21: note = modified_base - a, c, t, g, unknown or other - adenine, cytosine, thymine, or guanine
gagcccgtgcagctctccann

SEQ ID NO: 1215 - RNA, 21 nt, Rattus norvegicus
  source 1..21: mol_type = unassigned RNA
  misc_difference 20: note = modified_base - a, c, t, g, unknown or other - adenine, cytosine, thymine, or guanine
  misc_difference 21: note = modified_base - a, c, t, g, unknown or other - adenine, cytosine, thymine, or guanine
gagagctgcacgggctcacnn

SEQ ID NO: 1216 - RNA, 21 nt, Rattus norvegicus
  source 1..21: mol_type = unassigned RNA
  misc_difference 20: note = modified_base - a, c, t, g, unknown or other - adenine, cytosine, thymine, or guanine
  misc_difference 21: note = modified_base - a, c, t, g, unknown or other - adenine, cytosine, thymine, or guanine
gtgagcccgtgcagctctcnn

SEQ ID NO: 1217 - RNA, 21 nt, Rattus norvegicus
  source 1..21: mol_type = unassigned RNA
  misc_difference 20: note = modified_base - a, c, t, g, unknown or other - adenine, cytosine, thymine, or guanine
  misc_difference 21: note = modified_base - a, c, t, g, unknown or other - adenine, cytosine, thymine, or guanine
gagctgcacgggctcaccann

SEQ ID NO: 1218 - RNA, 21 nt, Rattus norvegicus
  source 1..21: mol_type = unassigned RNA
  misc_difference 20: note = modified_base - a, c, t, g, unknown or other - adenine, cytosine, thymine, or guanine
  misc_difference 21: note = modified_base - a, c, t, g, unknown or other - adenine, cytosine, thymine, or guanine
tggtgagcccgtgcagctcnn

SEQ ID NO: 1219 - RNA, 21 nt, Rattus norvegicus
  source 1..21: mol_type = unassigned RNA
  misc_difference 20: note = modified_base - a, c, t, g, unknown or other - adenine, cytosine, thymine, or guanine
  misc_difference 21: note = modified_base - a, c, t, g, unknown or other - adenine, cytosine, thymine, or guanine
tacaccatcgcagccctgcnn

SEQ ID NO: 1220 - RNA, 21 nt, Rattus norvegicus
  source 1..21: mol_type = unassigned RNA
  misc_difference 20: note = modified_base - a, c, t, g, unknown or other - adenine, cytosine, thymine, or guanine
  misc_difference 21: note = modified_base - a, c, t, g, unknown or other - adenine, cytosine, thymine, or guanine
gcagggctgcgatggtgtann

SEQ ID NO: 1221 - RNA, 21 nt, Rattus norvegicus
  source 1..21: mol_type = unassigned RNA
  misc_difference 20: note = modified_base - a, c, t, g, unknown or other - adenine, cytosine, thymine, or guanine
  misc_difference 21: note = modified_base - a, c, t, g, unknown or other - adenine, cytosine, thymine, or guanine
gtcctggatgctgtccgagnn

SEQ ID NO: 1222 - RNA, 21 nt, Rattus norvegicus
  source 1..21: mol_type = unassigned RNA
  misc_difference 20: note = modified_base - a, c, t, g, unknown or other - adenine, cytosine, thymine, or guanine
  misc_difference 21: note = modified_base - a, c, t, g, unknown or other - adenine, cytosine, thymine, or guanine
ctcggacagcatccaggacnn

SEQ ID NO: 1223 - RNA, 21 nt, Rattus norvegicus
  source 1..21: mol_type = unassigned RNA
  misc_difference 20: note = modified_base - a, c, t, g, unknown or other - adenine, cytosine, thymine, or guanine
  misc_difference 21: note = modified_base - a, c, t, g, unknown or other - adenine, cytosine, thymine, or guanine
agagctgcacgggctcaccnn

SEQ ID NO: 1224 - RNA, 21 nt, Rattus norvegicus
  source 1..21: mol_type = unassigned RNA
  misc_difference 20: note = modified_base - a, c, t, g, unknown or other - adenine, cytosine, thymine, or guanine
  misc_difference 21: note = modified_base - a, c, t, g, unknown or other - adenine, cytosine, thymine, or guanine
ggtgagcccgtgcagctctnn

SEQ ID NO: 1225 - DNA, 21 bp, Rattus norvegicus
  source 1..21: mol_type = unassigned DNA
  misc_feature 1..19: note = RNA
  misc_feature 20..21: note = DNA
gtcctctgatggtcaaagttt

SEQ ID NO: 1226 - DNA, 21 bp, Rattus norvegicus
  source 1..21: mol_type = unassigned DNA
  misc_feature 1..19: note = RNA
  misc_feature 20..21: note = DNA
actttgaccatcagaggactt

SEQ ID NO: 1227 - DNA, 21 bp, Rattus norvegicus
  source 1..21: mol_type = unassigned DNA
  misc_feature 1..19: note = RNA
  misc_feature 20..21: note = DNA
ttcttgctctataaaccgttt

SEQ ID NO: 1228 - DNA, 21 bp, Rattus norvegicus
  source 1..21: mol_type = unassigned DNA
  misc_feature 1..19: note = RNA
  misc_feature 20..21: note = DNA
acggtttatagagcaagaatt

SEQ ID NO: 1229 - DNA, 21 bp, Rattus norvegicus
  source 1..21: mol_type = unassigned DNA
  misc_feature 1..19: note = RNA
  misc_feature 20..21: note = DNA
ctctataaaccgtgttagctt

SEQ ID NO: 1230 - DNA, 21 bp, Rattus norvegicus
  source 1..21: mol_type = unassigned DNA
  misc_feature 1..19: note = RNA
  misc_feature 20..21: note = DNA
gctaacacggtttatagagtt

SEQ ID NO: 1231 - DNA, 21 bp, Rattus norvegicus
  source 1..21: mol_type = unassigned DNA
  misc_feature 1..19: note = RNA
  misc_feature 20..21: note = DNA
tcgccactacaccatcgcatt

SEQ ID NO: 1232 - DNA, 21 bp, Rattus norvegicus
  source 1..21: mol_type = unassigned DNA
  misc_feature 1..19: note = RNA
  misc_feature 20..21: note = DNA
tgcgatggtgtagtggcgatt

SEQ ID NO: 1233 - DNA, 21 bp, Rattus norvegicus
  source 1..21: mol_type = unassigned DNA
  misc_feature 1..19: note = RNA
  misc_feature 20..21: note = DNA
tcttgctctataaaccgtgtt

SEQ ID NO: 1234 - DNA, 21 bp, Rattus norvegicus
  source 1..21: mol_type = unassigned DNA
  misc_feature 1..19: note = RNA
  misc_feature 20..21: note = DNA
cacggtttatagagcaagatt

SEQ ID NO: 1235 - DNA, 21 bp, Rattus norvegicus
  source 1..21: mol_type = unassigned DNA
  misc_feature 1..19: note = RNA
  misc_feature 20..21: note = DNA
tgctctataaaccgtgttatt

SEQ ID NO: 1236 - DNA, 21 bp, Rattus norvegicus
  source 1..21: mol_type = unassigned DNA
  misc_feature 1..19: note = RNA
  misc_feature 20..21: note = DNA
taacacggtttatagagcatt

SEQ ID NO: 1237 - DNA, 21 bp, Rattus norvegicus
  source 1..21: mol_type = unassigned DNA
  misc_feature 1..19: note = RNA
  misc_feature 20..21: note = DNA
cagtgttcttgctctataatt

SEQ ID NO: 1238 - DNA, 21 bp, Rattus norvegicus
  source 1..21: mol_type = unassigned DNA
  misc_feature 1..19: note = RNA
  misc_feature 20..21: note = DNA
ttatagagcaagaacactgtt

SEQ ID NO: 1239 - DNA, 21 bp, Rattus norvegicus
  source 1..21: mol_type = unassigned DNA
  misc_feature 1..19: note = RNA
  misc_feature 20..21: note = DNA
gctctataaaccgtgttagtt

SEQ ID NO: 1240 - DNA, 21 bp, Rattus norvegicus
  source 1..21: mol_type = unassigned DNA
  misc_feature 1..19: note = RNA
  misc_feature 20..21: note = DNA
ctaacacggtttatagagctt

SEQ ID NO: 1241 - DNA, 21 bp, Rattus norvegicus
  source 1..21: mol_type = unassigned DNA
  misc_feature 1..19: note = RNA
  misc_feature 20..21: note = DNA
cctggatgctgtccgaggctt

SEQ ID NO: 1242 - DNA, 21 bp, Rattus norvegicus
  source 1..21: mol_type = unassigned DNA
  misc_feature 1..19: note = RNA
  misc_feature 20..21: note = DNA
gcctcggacagcatccaggtt

SEQ ID NO: 1243 - DNA, 21 bp, Rattus norvegicus
  source 1..21: mol_type = unassigned DNA
  misc_feature 1..19: note = RNA
  misc_feature 20..21: note = DNA
tctgatggtcaaagtcctgtt

SEQ ID NO: 1244 - DNA, 21 bp, Rattus norvegicus
  source 1..21: mol_type = unassigned DNA
  misc_feature 1..19: note = RNA
  misc_feature 20..21: note = DNA
caggactttgaccatcagatt

SEQ ID NO: 1245 - DNA, 21 bp, Rattus norvegicus
  source 1..21: mol_type = unassigned DNA
  misc_feature 1..19: note = RNA
  misc_feature 20..21: note = DNA
ctggagagctgcacgggcttt

SEQ ID NO: 1246 - DNA, 21 bp, Rattus norvegicus
  source 1..21: mol_type = unassigned DNA
  misc_feature 1..19: note = RNA
  misc_feature 20..21: note = DNA
agcccgtgcagctctccagtt

SEQ ID NO: 1247 - DNA, 21 bp, Rattus norvegicus
  source 1..21: mol_type = unassigned DNA
  misc_feature 1..19: note = RNA
  misc_feature 20..21: note = DNA
tctataaaccgtgttagcatt

SEQ ID NO: 1248 - DNA, 21 bp, Rattus norvegicus
  source 1..21: mol_type = unassigned DNA
  misc_feature 1..19: note = RNA
  misc_feature 20..21: note = DNA
tgctaacacggtttatagatt

SEQ ID NO: 1249 - DNA, 21 bp, Rattus norvegicus
  source 1..21: mol_type = unassigned DNA
  misc_feature 1..19: note = RNA
  misc_feature 20..21: note = DNA
aacagtgttcttgctctattt

SEQ ID NO: 1250 - DNA, 21 bp, Rattus norvegicus
  source 1..21: mol_type = unassigned DNA
  misc_feature 1..19: note = RNA
  misc_feature 20..21: note = DNA
atagagcaagaacactgtttt

SEQ ID NO: 1251 - DNA, 21 bp, Rattus norvegicus
  source 1..21: mol_type = unassigned DNA
  misc_feature 1..19: note = RNA
  misc_feature 20..21: note = DNA
ctctgatggtcaaagtccttt

SEQ ID NO: 1252 - DNA, 21 bp, Rattus norvegicus
  source 1..21: mol_type = unassigned DNA
  misc_feature 1..19: note = RNA
  misc_feature 20..21: note = DNA
aggactttgaccatcagagtt

SEQ ID NO: 1253 - DNA, 21 bp, Rattus norvegicus
  source 1..21: mol_type = unassigned DNA
  misc_feature 1..19: note = RNA
  misc_feature 20..21: note = DNA
tgctgtccgaggcagcccttt

SEQ ID NO: 1254 - DNA, 21 bp, Rattus norvegicus
  source 1..21: mol_type = unassigned DNA
  misc_feature 1..19: note = RNA
  misc_feature 20..21: note = DNA
agggctgcctcggacagcatt

SEQ ID NO: 1255 - DNA, 21 bp, Rattus norvegicus
  source 1..21: mol_type = unassigned DNA
  misc_feature 1..19: note = RNA
  misc_feature 20..21: note = DNA
gtctggagagctgcacgggtt

SEQ ID NO: 1256 - DNA, 21 bp, Rattus norvegicus
  source 1..21: mol_type = unassigned DNA
  misc_feature 1..19: note = RNA
  misc_feature 20..21: note = DNA
cccgtgcagctctccagactt

SEQ ID NO: 1257 - DNA, 21 bp, Rattus norvegicus
  source 1..21: mol_type = unassigned DNA
  misc_feature 1..19: note = RNA
  misc_feature 20..21: note = DNA
acagtgttcttgctctatatt

SEQ ID NO: 1258 - DNA, 21 bp, Rattus norvegicus
  source 1..21: mol_type = unassigned DNA
  misc_feature 1..19: note = RNA
  misc_feature 20..21: note = DNA
tatagagcaagaacactgttt

SEQ ID NO: 1259 - DNA, 21 bp, Rattus norvegicus
  source 1..21: mol_type = unassigned DNA
  misc_feature 1..19: note = RNA
  misc_feature 20..21: note = DNA
cctctgatggtcaaagtcctt

SEQ ID NO: 1260 - DNA, 21 bp, Rattus norvegicus
  source 1..21: mol_type = unassigned DNA
  misc_feature 1..19: note = RNA
  misc_feature 20..21: note = DNA
ggactttgaccatcagaggtt

SEQ ID NO: 1261 - DNA, 21 bp, Rattus norvegicus
  source 1..21: mol_type = unassigned DNA
  misc_feature 1..19: note = RNA
  misc_feature 20..21: note = DNA
agtcctggatgctgtccgatt

SEQ ID NO: 1262 - DNA, 21 bp, Rattus norvegicus
  source 1..21: mol_type = unassigned DNA
  misc_feature 1..19: note = RNA
  misc_feature 20..21: note = DNA
tcggacagcatccaggacttt

SEQ ID NO: 1263 - DNA, 21 bp, Rattus norvegicus
  source 1..21: mol_type = unassigned DNA
  misc_feature 1..19: note = RNA
  misc_feature 20..21: note = DNA
ttgcctctgggaagaccgctt

SEQ ID NO: 1264 - DNA, 21 bp, Rattus norvegicus
  source 1..21: mol_type = unassigned DNA
  misc_feature 1..19: note = RNA
  misc_feature 20..21: note = DNA
gcggtcttcccagaggcaatt

SEQ ID NO: 1265 - DNA, 21 bp, Rattus norvegicus
  source 1..21: mol_type = unassigned DNA
  misc_feature 1..19: note = RNA
  misc_feature 20..21: note = DNA
tggagagctgcacgggctctt

SEQ ID NO: 1266 - DNA, 21 bp, Rattus norvegicus
  source 1..21: mol_type = unassigned DNA
  misc_feature 1..19: note = RNA
  misc_feature 20..21: note = DNA
gagcccgtgcagctctccatt

SEQ ID NO: 1267 - DNA, 21 bp, Rattus norvegicus
  source 1..21: mol_type = unassigned DNA
  misc_feature 1..19: note = RNA
  misc_feature 20..21: note = DNA
gagagctgcacgggctcactt

SEQ ID NO: 1268 - DNA, 21 bp, Rattus norvegicus
  source 1..21: mol_type = unassigned DNA
  misc_feature 1..19: note = RNA
  misc_feature 20..21: note = DNA
gtgagcccgtgcagctctctt

SEQ ID NO: 1269 - DNA, 21 bp, Rattus norvegicus
  source 1..21: mol_type = unassigned DNA
  misc_feature 1..19: note = RNA
  misc_feature 20..21: note = DNA
gagctgcacgggctcaccatt

SEQ ID NO: 1270 - DNA, 21 bp, Rattus norvegicus
  source 1..21: mol_type = unassigned DNA
  misc_feature 1..19: note = RNA
  misc_feature 20..21: note = DNA
tggtgagcccgtgcagctctt

SEQ ID NO: 1271 - DNA, 21 bp, Rattus norvegicus
  source 1..21: mol_type = unassigned DNA
  misc_feature 1..19: note = RNA
  misc_feature 20..21: note = DNA
tacaccatcgcagccctgctt

SEQ ID NO: 1272 - DNA, 21 bp, Rattus norvegicus
  source 1..21: mol_type = unassigned DNA
  misc_feature 1..19: note = RNA
  misc_feature 20..21: note = DNA
gcagggctgcgatggtgtatt

SEQ ID NO: 1273 - DNA, 21 bp, Rattus norvegicus
  source 1..21: mol_type = unassigned DNA
  misc_feature 1..19: note = RNA
  misc_feature 20..21: note = DNA
gtcctggatgctgtccgagtt

SEQ ID NO: 1274 - DNA, 21 bp, Rattus norvegicus
  source 1..21: mol_type = unassigned DNA
  misc_feature 1..19: note = RNA
  misc_feature 20..21: note = DNA
ctcggacagcatccaggactt

SEQ ID NO: 1275 - DNA, 21 bp, Rattus norvegicus
  source 1..21: mol_type = unassigned DNA
  misc_feature 1..19: note = RNA
  misc_feature 20..21: note = DNA
agagctgcacgggctcacctt

SEQ ID NO: 1276 - DNA, 21 bp, Rattus norvegicus
  source 1..21: mol_type = unassigned DNA
  misc_feature 1..19: note = RNA
  misc_feature 20..21: note = DNA
ggtgagcccgtgcagctcttt

SEQ ID NO: 1277 - DNA, 21 bp, Rattus norvegicus
  source 1..21: mol_type = unassigned DNA
  modified_base 2: mod_base = OTHER; note = 2'-O-methyluridine-3'-phosphate
  modified_base 3: mod_base = OTHER; note = 2'-O-methylcytidine-3'-phosphate
  modified_base 4: mod_base = OTHER; note = 2'-O-methylcytidine-3'-phosphate
  modified_base 5: mod_base = OTHER; note = 2'-O-methyluridine-3'-phosphate
  modified_base 6: mod_base = OTHER; note = 2'-O-methylcytidine-3'-phosphate
  modified_base 7: mod_base = OTHER; note = 2'-O-methyluridine-3'-phosphate
  modified_base 10: mod_base = OTHER; note = 2'-O-methyluridine-3'-phosphate
  modified_base 13: mod_base = OTHER; note = 2'-O-methyluridine-3'-phosphate
  modified_base 14: mod_base = OTHER; note = 2'-O-methylcytidine-3'-phosphate
  modified_base 19: mod_base = OTHER; note = 2'-O-methyluridine-3'-phosphate
  misc_feature 1..19: note = RNA
  misc_feature 20..21: note = DNA
gtcctctgatggtcaaagttt

SEQ ID NO: 1278 - DNA, 21 bp, Rattus norvegicus
  source 1..21: mol_type = unassigned DNA
  modified_base 9: mod_base = OTHER; note = 2'-O-methylcytidine-3'-phosphate
  modified_base 12: mod_base = OTHER; note = 2'-O-methylcytidine-3'-phosphate
  misc_feature 1..19: note = RNA
  misc_feature 20..21: note = DNA
actttgaccatcagaggactt

SEQ ID NO: 1279 - DNA, 21 bp, Rattus norvegicus
  source 1..21: mol_type = unassigned DNA
  modified_base 1: mod_base = OTHER; note = 2'-O-methyluridine-3'-phosphate
  modified_base 2: mod_base = OTHER; note = 2'-O-methyluridine-3'-phosphate
  modified_base 3: mod_base = OTHER; note = 2'-O-methylcytidine-3'-phosphate
  modified_base 4: mod_base = OTHER; note = 2'-O-methyluridine-3'-phosphate
  modified_base 5: mod_base = OTHER; note = 2'-O-methyluridine-3'-phosphate
  modified_base 7: mod_base = OTHER; note = 2'-O-methylcytidine-3'-phosphate
  modified_base 8: mod_base = OTHER; note = 2'-O-methyluridine-3'-phosphate
  modified_base 9: mod_base = OTHER; note = 2'-O-methylcytidine-3'-phosphate
  modified_base 10: mod_base = OTHER; note = 2'-O-methyluridine-3'-phosphate
  modified_base 12: mod_base = OTHER; note = 2'-O-methyluridine-3'-phosphate
  modified_base 16: mod_base = OTHER; note = 2'-O-methylcytidine-3'-phosphate
  modified_base 17: mod_base = OTHER; note = 2'-O-methylcytidine-3'-phosphate
  modified_base 19: mod_base = OTHER; note = 2'-O-methyluridine-3'-phosphate
  misc_feature 1..19: note = RNA
  misc_feature 20..21: note = DNA
ttcttgctctataaaccgttt

SEQ ID NO: 1280 - DNA, 21 bp, Rattus norvegicus
  source 1..21: mol_type = unassigned DNA
  modified_base 7: mod_base = OTHER; note = 2'-O-methyluridine-3'-phosphate
  modified_base 9: mod_base = OTHER; note = 2'-O-methyluridine-3'-phosphate
  modified_base 14: mod_base = OTHER; note = 2'-O-methylcytidine-3'-phosphate
  misc_feature 1..19: note = RNA
  misc_feature 20..21: note = DNA
acggtttatagagcaagaatt

SEQ ID NO: 1281 - DNA, 21 bp, Rattus norvegicus
  source 1..21: mol_type = unassigned DNA
  modified_base 1: mod_base = OTHER; note = 2'-O-methylcytidine-3'-phosphate
  modified_base 2: mod_base = OTHER; note = 2'-O-methyluridine-3'-phosphate
  modified_base 3: mod_base = OTHER; note = 2'-O-methylcytidine-3'-phosphate
  modified_base 4: mod_base = OTHER; note = 2'-O-methyluridine-3'-phosphate
  modified_base 6: mod_base = OTHER; note = 2'-O-methyluridine-3'-phosphate
  modified_base 10: mod_base = OTHER; note = 2'-O-methylcytidine-3'-phosphate
  modified_base 11: mod_base = OTHER; note = 2'-O-methylcytidine-3'-phosphate
  modified_base 13: mod_base = OTHER; note = 2'-O-methyluridine-3'-phosphate
  modified_base 15: mod_base = OTHER; note = 2'-O-methyluridine-3'-phosphate
  modified_base 16: mod_base = OTHER; note = 2'-O-methyluridine-3'-phosphate
  modified_base 19: mod_base = OTHER; note = 2'-O-methylcytidine-3'-phosphate
  misc_feature 1..19: note = RNA
  misc_feature 20..21: note = DNA
ctctataaaccgtgttagctt

SEQ ID NO: 1282 - DNA, 21 bp, Rattus norvegicus
  source 1..21: mol_type = unassigned DNA
  modified_base 3: mod_base = OTHER; note = 2'-O-methyluridine-3'-phosphate
  modified_base 6: mod_base = OTHER; note = 2'-O-methylcytidine-3'-phosphate
  modified_base 13: mod_base = OTHER; note = 2'-O-methyluridine-3'-phosphate
  modified_base 15: mod_base = OTHER; note = 2'-O-methyluridine-3'-phosphate
  misc_feature 1..19: note = RNA
  misc_feature 20..21: note = DNA
gctaacacggtttatagagtt

SEQ ID NO: 1283 - DNA, 21 bp, Rattus norvegicus
  source 1..21: mol_type = unassigned DNA
  modified_base 1: mod_base = OTHER; note = 2'-O-methyluridine-3'-phosphate
  modified_base 2: mod_base = OTHER; note = 2'-O-methylcytidine-3'-phosphate
  modified_base 4: mod_base = OTHER; note = 2'-O-methylcytidine-3'-phosphate
  modified_base 5: mod_base = OTHER; note = 2'-O-methylcytidine-3'-phosphate
  modified_base 7: mod_base = OTHER; note = 2'-O-methylcytidine-3'-phosphate
  modified_base 8: mod_base = OTHER; note = 2'-O-methyluridine-3'-phosphate
  modified_base 10: mod_base = OTHER; note = 2'-O-methylcytidine-3'-phosphate
  modified_base 12: mod_base = OTHER; note = 2'-O-methylcytidine-3'-phosphate
  modified_base 13: mod_base = OTHER; note = 2'-O-methylcytidine-3'-phosphate
  modified_base 15: mod_base = OTHER; note = 2'-O-methyluridine-3'-phosphate
  modified_base 16: mod_base = OTHER; note = 2'-O-methylcytidine-3'-phosphate
  modified_base 18: mod_base = OTHER; note = 2'-O-methylcytidine-3'-phosphate
  misc_feature 1..19: note = RNA
  misc_feature 20..21: note = DNA
tcgccactacaccatcgcatt

SEQ ID NO: 1284 - DNA, 21 bp, Rattus norvegicus
  source 1..21: mol_type = unassigned DNA
  modified_base 11: mod_base = OTHER; note = 2'-O-methyluridine-3'-phosphate
  misc_feature 1..19: note = RNA
  misc_feature 20..21: note = DNA
tgcgatggtgtagtggcgatt

SEQ ID NO: 1285 - DNA, 21 bp, Rattus norvegicus
  source 1..21: mol_type = unassigned DNA
  modified_base 1: mod_base = OTHER; note = 2'-O-methyluridine-3'-phosphate
  modified_base 2: mod_base = OTHER; note = 2'-O-methylcytidine-3'-phosphate
  modified_base 3: mod_base = OTHER; note = 2'-O-methyluridine-3'-phosphate
  modified_base 4: mod_base = OTHER; note = 2'-O-methyluridine-3'-phosphate
  modified_base 6: mod_base = OTHER; note = 2'-O-methylcytidine-3'-phosphate
  modified_base 7: mod_base = OTHER; note = 2'-O-methyluridine-3'-phosphate
  modified_base 8: mod_base = OTHER; note = 2'-O-methylcytidine-3'-phosphate
  modified_base 9: mod_base = OTHER; note = 2'-O-methyluridine-3'-phosphate
  modified_base 11: mod_base = OTHER; note = 2'-O-methyluridine-3'-phosphate
  modified_base 15: mod_base = OTHER; note = 2'-O-methylcytidine-3'-phosphate
  modified_base 16: mod_base = OTHER; note = 2'-O-methylcytidine-3'-phosphate
  modified_base 18: mod_base = OTHER; note = 2'-O-methyluridine-3'-phosphate
  misc_feature 1..19: note = RNA
  misc_feature 20..21: note = DNA
tcttgctctataaaccgtgtt

SEQ ID NO: 1286 - DNA, 21 bp, Rattus norvegicus
  source 1..21: mol_type = unassigned DNA
  modified_base 1: mod_base = OTHER; note = 2'-O-methylcytidine-3'-phosphate
  modified_base 8: mod_base = OTHER; note = 2'-O-methyluridine-3'-phosphate
  modified_base 10: mod_base = OTHER; note = 2'-O-methyluridine-3'-phosphate
  modified_base 15: mod_base = OTHER; note = 2'-O-methylcytidine-3'-phosphate
  misc_feature 1..19: note = RNA
  misc_feature 20..21: note = DNA
cacggtttatagagcaagatt

SEQ ID NO: 1287 - DNA, 21 bp, Rattus norvegicus
  source 1..21: mol_type = unassigned DNA
  modified_base 1: mod_base = OTHER; note = 2'-O-methyluridine-3'-phosphate
  modified_base 3: mod_base = OTHER; note = 2'-O-methylcytidine-3'-phosphate
  modified_base 4: mod_base = OTHER; note = 2'-O-methyluridine-3'-phosphate
  modified_base 5: mod_base = OTHER; note = 2'-O-methylcytidine-3'-phosphate
  modified_base 6: mod_base = OTHER; note = 2'-O-methyluridine-3'-phosphate
  modified_base 8: mod_base = OTHER; note = 2'-O-methyluridine-3'-phosphate
  modified_base 12: mod_base = OTHER; note = 2'-O-methylcytidine-3'-phosphate
  modified_base 13: mod_base = OTHER; note = 2'-O-methylcytidine-3'-phosphate
  modified_base 15: mod_base = OTHER; note = 2'-O-methyluridine-3'-phosphate
  modified_base 17: mod_base = OTHER; note = 2'-O-methyluridine-3'-phosphate
  modified_base 18: mod_base = OTHER; note = 2'-O-methyluridine-3'-phosphate
  misc_feature 1..19: note = RNA
  misc_feature 20..21: note = DNA
tgctctataaaccgtgttatt

SEQ ID NO: 1288 - DNA, 21 bp, Rattus norvegicus
  source 1..21: mol_type = unassigned DNA
  modified_base 1: mod_base = OTHER; note = 2'-O-methyluridine-3'-phosphate
  modified_base 4: mod_base = OTHER; note = 2'-O-methylcytidine-3'-phosphate
  modified_base 11: mod_base = OTHER; note = 2'-O-methyluridine-3'-phosphate
  modified_base 13: mod_base = OTHER; note = 2'-O-methyluridine-3'-phosphate
  modified_base 18: mod_base = OTHER; note = 2'-O-methylcytidine-3'-phosphate
  misc_feature 1..19: note = RNA
  misc_feature 20..21: note = DNA
taacacggtttatagagcatt

SEQ ID NO: 1289 - DNA, 21 bp, Rattus norvegicus
  source 1..21: mol_type = unassigned DNA
  modified_base 1: mod_base = OTHER; note = 2'-O-methylcytidine-3'-phosphate
  modified_base 4: mod_base = OTHER; note = 2'-O-methyluridine-3'-phosphate
  modified_base 6: mod_base = OTHER; note = 2'-O-methyluridine-3'-phosphate
  modified_base 7: mod_base = OTHER; note = 2'-O-methyluridine-3'-phosphate
  modified_base 8: mod_base = OTHER; note = 2'-O-methylcytidine-3'-phosphate
  modified_base 9: mod_base = OTHER; note = 2'-O-methyluridine-3'-phosphate
  modified_base 10: mod_base = OTHER; note = 2'-O-methyluridine-3'-phosphate
  modified_base 12: mod_base = OTHER; note = 2'-O-methylcytidine-3'-phosphate
  modified_base 13: mod_base = OTHER; note = 2'-O-methyluridine-3'-phosphate
  modified_base 14: mod_base = OTHER; note = 2'-O-methylcytidine-3'-phosphate
  modified_base 15: mod_base = OTHER; note = 2'-O-methyluridine-3'-phosphate
  modified_base 17: mod_base = OTHER; note = 2'-O-methyluridine-3'-phosphate
  misc_feature 1..19: note = RNA
  misc_feature 20..21: note = DNA
cagtgttcttgctctataatt

SEQ ID NO: 1290 - DNA, 21 bp, Rattus norvegicus
  source 1..21: mol_type = unassigned DNA
  modified_base 2: mod_base = OTHER; note = 2'-O-methyluridine-3'-phosphate
  modified_base 4: mod_base = OTHER; note = 2'-O-methyluridine-3'-phosphate
  modified_base 9: mod_base = OTHER; note = 2'-O-methylcytidine-3'-phosphate
  modified_base 15: mod_base = OTHER; note = 2'-O-methylcytidine-3'-phosphate
  misc_feature 1..19: note = RNA
  misc_feature 20..21: note = DNA
ttatagagcaagaacactgtt

SEQ ID NO: 1291 - DNA, 21 bp, Rattus norvegicus
  source 1..21: mol_type = unassigned DNA
  modified_base 2: mod_base = OTHER; note = 2'-O-methylcytidine-3'-phosphate
  modified_base 3: mod_base = OTHER; note = 2'-O-methyluridine-3'-phosphate
  modified_base 4: mod_base = OTHER; note = 2'-O-methylcytidine-3'-phosphate
  modified_base 5: mod_base = OTHER; note = 2'-O-methyluridine-3'-phosphate
  modified_base 7: mod_base = OTHER; note = 2'-O-methyluridine-3'-phosphate
  modified_base 11: mod_base = OTHER; note = 2'-O-methylcytidine-3'-phosphate
  modified_base 12: mod_base = OTHER; note = 2'-O-methylcytidine-3'-phosphate
  modified_base 14: mod_base = OTHER; note = 2'-O-methyluridine-3'-phosphate
  modified_base 16: mod_base = OTHER; note = 2'-O-methyluridine-3'-phosphate
  modified_base 17: mod_base = OTHER; note = 2'-O-methyluridine-3'-phosphate
  misc_feature 1..19: note = RNA
  misc_feature 20..21: note = DNA
gctctataaaccgtgttagtt

SEQ ID NO: 1292 - DNA, 21 bp, Rattus norvegicus
  source 1..21: mol_type = unassigned DNA
  modified_base 2: mod_base = OTHER; note = 2'-O-methyluridine-3'-phosphate
  modified_base 5: mod_base = OTHER; note = 2'-O-methylcytidine-3'-phosphate
  modified_base 12: mod_base = OTHER; note = 2'-O-methyluridine-3'-phosphate
  modified_base 14: mod_base = OTHER; note = 2'-O-methyluridine-3'-phosphate
  misc_feature 1..19: note = RNA
  misc_feature 20..21: note = DNA
ctaacacggtttatagagctt

SEQ ID NO: 1293 - DNA, 21 bp, Rattus norvegicus
  source 1..21: mol_type = unassigned DNA
  modified_base 1: mod_base = OTHER; note = 2'-O-methylcytidine-3'-phosphate
  modified_base 2: mod_base = OTHER; note = 2'-O-methylcytidine-3'-phosphate
  modified_base 3: mod_base = OTHER; note = 2'-O-methyluridine-3'-phosphate
  modified_base 7: mod_base = OTHER; note = 2'-O-methyluridine-3'-phosphate
  modified_base 9: mod_base = OTHER; note = 2'-O-methylcytidine-3'-phosphate
  modified_base 10: mod_base = OTHER; note = 2'-O-methyluridine-3'-phosphate
  modified_base 12: mod_base = OTHER; note = 2'-O-methyluridine-3'-phosphate
  modified_base 13: mod_base = OTHER; note = 2'-O-methylcytidine-3'-phosphate
  modified_base 14: mod_base = OTHER; note = 2'-O-methylcytidine-3'-phosphate
  modified_base 19: mod_base = OTHER; note = 2'-O-methylcytidine-3'-phosphate
  misc_feature 1..19: note = RNA
  misc_feature 20..21: note = DNA
cctggatgctgtccgaggctt

SEQ ID NO: 1294 - DNA, 21 bp, Rattus norvegicus
  source 1..21: mol_type = unassigned DNA
  modified_base 9: mod_base = OTHER; note = 2'-O-methylcytidine-3'-phosphate
  modified_base 12: mod_base = OTHER; note = 2'-O-methylcytidine-3'-phosphate
  modified_base 16: mod_base = OTHER; note = 2'-O-methylcytidine-3'-phosphate
  misc_feature 1..19: note = RNA
  misc_feature 20..21: note = DNA
gcctcggacagcatccaggtt

SEQ ID NO: 1295 - DNA, 21 bp, Rattus norvegicus
  source 1..21: mol_type = unassigned DNA
  modified_base 1: mod_base = OTHER; note = 2'-O-methyluridine-3'-phosphate
  modified_base 2: mod_base = OTHER; note = 2'-O-methylcytidine-3'-phosphate
  modified_base 3: mod_base = OTHER; note = 2'-O-methyluridine-3'-phosphate
  modified_base 6: mod_base = OTHER; note = 2'-O-methyluridine-3'-phosphate
  modified_base 9: mod_base = OTHER; note = 2'-O-methyluridine-3'-phosphate
  modified_base 10: mod_base = OTHER; note = 2'-O-methylcytidine-3'-phosphate
  modified_base 15: mod_base = OTHER; note = 2'-O-methyluridine-3'-phosphate
  modified_base 16: mod_base = OTHER; note = 2'-O-methylcytidine-3'-phosphate
  modified_base 17: mod_base = OTHER; note = 2'-O-methylcytidine-3'-phosphate
  modified_base 18: mod_base = OTHER; note = 2'-O-methyluridine-3'-phosphate
  misc_feature 1..19: note = RNA
  misc_feature 20..21: note = DNA
tctgatggtcaaagtcctgtt

SEQ ID NO: 1296 - DNA, 21 bp, Rattus norvegicus
  source 1..21: mol_type = unassigned DNA
  modified_base 1: mod_base = OTHER; note = 2'-O-methylcytidine-3'-phosphate
  modified_base 13: mod_base = OTHER; note = 2'-O-methylcytidine-3'-phosphate
  modified_base 16: mod_base = OTHER; note = 2'-O-methylcytidine-3'-phosphate
  misc_feature 1..19: note = RNA
  misc_feature 20..21: note = DNA
caggactttgaccatcagatt

SEQ ID NO: 1297 - DNA, 21 bp, Rattus norvegicus
  source 1..21: mol_type = unassigned DNA
  modified_base 1: mod_base = OTHER; note = 2'-O-methylcytidine-3'-phosphate
  modified_base 2: mod_base = OTHER; note = 2'-O-methyluridine-3'-phosphate
  modified_base 9: mod_base = OTHER; note = 2'-O-methylcytidine-3'-phosphate
  modified_base 10: mod_base = OTHER; note = 2'-O-methyluridine-3'-phosphate
  modified_base 12: mod_base = OTHER; note = 2'-O-methylcytidine-3'-phosphate
  modified_base 14: mod_base = OTHER; note = 2'-O-methylcytidine-3'-phosphate
  modified_base 18: mod_base = OTHER; note = 2'-O-methylcytidine-3'-phosphate
  modified_base 19: mod_base = OTHER; note = 2'-O-methyluridine-3'-phosphate
  misc_feature 1..19: note = RNA
  misc_feature 20..21: note = DNA
ctggagagctgcacgggcttt

SEQ ID NO: 1298 - DNA, 21 bp, Rattus norvegicus
  source 1..21: mol_type = unassigned DNA
  modified_base 9: mod_base = OTHER; note = 2'-O-methylcytidine-3'-phosphate
  modified_base 17: mod_base = OTHER; note = 2'-O-methylcytidine-3'-phosphate
  misc_feature 1..19: note = RNA
  misc_feature 20..21: note = DNA
agcccgtgcagctctccagtt

SEQ ID NO: 1299 - DNA, 21 bp, Rattus norvegicus
  source 1..21: mol_type = unassigned DNA
  modified_base 1: mod_base = OTHER; note = 2'-O-methyluridine-3'-phosphate
  modified_base 2: mod_base = OTHER; note = 2'-O-methylcytidine-3'-phosphate
  modified_base 3: mod_base = OTHER; note = 2'-O-methyluridine-3'-phosphate
  modified_base 5: mod_base = OTHER; note = 2'-O-methyluridine-3'-phosphate
  modified_base 9: mod_base = OTHER; note = 2'-O-methylcytidine-3'-phosphate
  modified_base 10: mod_base = OTHER; note = 2'-O-methylcytidine-3'-phosphate
  modified_base 12: mod_base = OTHER; note = 2'-O-methyluridine-3'-phosphate
  modified_base 14: mod_base = OTHER; note = 2'-O-methyluridine-3'-phosphate
  modified_base 15: mod_base = OTHER; note = 2'-O-methyluridine-3'-phosphate
  modified_base 18: mod_base = OTHER; note = 2'-O-methylcytidine-3'-phosphate
  misc_feature 1..19: note = RNA
  misc_feature 20..21: note = DNA
tctataaaccgtgttagcatt

SEQ ID NO: 1300 - DNA, 21 bp, Rattus norvegicus
  source 1..21: mol_type = unassigned DNA
  modified_base 4: mod_base = OTHER; note = 2'-O-methyluridine-3'-phosphate
  modified_base 7: mod_base = OTHER; note = 2'-O-methylcytidine-3'-phosphate
  modified_base 14: mod_base = OTHER; note = 2'-O-methyluridine-3'-phosphate
  modified_base 16: mod_base = OTHER; note = 2'-O-methyluridine-3'-phosphate
  misc_feature 1..19: note = RNA
  misc_feature 20..21: note = DNA
tgctaacacggtttatagatt

SEQ ID NO: 1301 - DNA, 21 bp, Rattus norvegicus
  source 1..21: mol_type = unassigned DNA
  modified_base 3: mod_base = OTHER; note = 2'-O-methylcytidine-3'-phosphate
  modified_base 6: mod_base = OTHER; note = 2'-O-methyluridine-3'-phosphate
  modified_base 8: mod_base = OTHER; note = 2'-O-methyluridine-3'-phosphate
  modified_base 9: mod_base = OTHER; note = 2'-O-methyluridine-3'-phosphate
  modified_base 10: mod_base = OTHER; note = 2'-O-methylcytidine-3'-phosphate
  modified_base 11: mod_base = OTHER; note = 2'-O-methyluridine-3'-phosphate
  modified_base 12: mod_base = OTHER; note = 2'-O-methyluridine-3'-phosphate
  modified_base 14: mod_base = OTHER; note = 2'-O-methylcytidine-3'-phosphate
  modified_base 15: mod_base = OTHER; note = 2'-O-methyluridine-3'-phosphate
  modified_base 16: mod_base = OTHER; note = 2'-O-methylcytidine-3'-phosphate
  modified_base 17: mod_base = OTHER; note = 2'-O-methyluridine-3'-phosphate
  modified_base 19: mod_base = OTHER; note = 2'-O-methyluridine-3'-phosphate
  misc_feature 1..19: note = RNA
  misc_feature 20..21: note = DNA
aacagtgttcttgctctattt

SEQ ID NO: 1302 - DNA, 21 bp, Rattus norvegicus
  source 1..21: mol_type = unassigned DNA
  modified_base 2: mod_base = OTHER; note = 2'-O-methyluridine-3'-phosphate
  modified_base 7: mod_base = OTHER; note = 2'-O-methylcytidine-3'-phosphate
  modified_base 13: mod_base = OTHER; note = 2'-O-methylcytidine-3'-phosphate
  misc_feature 1..19: note = RNA
  misc_feature 20..21: note = DNA
atagagcaagaacactgtttt

SEQ ID NO: 1303 - DNA, 21 bp, Rattus norvegicus
  source 1..21: mol_type = unassigned DNA
  modified_base 1: mod_base = OTHER; note = 2'-O-methylcytidine-3'-phosphate
  modified_base 2: mod_base = OTHER; note = 2'-O-methyluridine-3'-phosphate
  modified_base 3: mod_base = OTHER; note = 2'-O-methylcytidine-3'-phosphate
  modified_base 4: mod_base = OTHER; note = 2'-O-methyluridine-3'-phosphate
  modified_base 7: mod_base = OTHER; note = 2'-O-methyluridine-3'-phosphate
  modified_base 10: mod_base = OTHER; note = 2'-O-methyluridine-3'-phosphate
  modified_base 11: mod_base = OTHER; note = 2'-O-methylcytidine-3'-phosphate
  modified_base 16: mod_base = OTHER; note = 2'-O-methyluridine-3'-phosphate
  modified_base 17: mod_base = OTHER; note = 2'-O-methylcytidine-3'-phosphate
  modified_base 18: mod_base = OTHER; note = 2'-O-methylcytidine-3'-phosphate
  modified_base 19: mod_base = OTHER; note = 2'-O-methyluridine-3'-phosphate
  misc_feature 1..19: note = RNA
  misc_feature 20..21: note = DNA
ctctgatggtcaaagtccttt

SEQ ID NO: 1304 - DNA, 21 bp, Rattus norvegicus
  source 1..21: mol_type = unassigned DNA
  modified_base 12: mod_base = OTHER; note = 2'-O-methylcytidine-3'-phosphate
  modified_base 15: mod_base = OTHER; note = 2'-O-methylcytidine-3'-phosphate
  misc_feature 1..19: note = RNA
  misc_feature 20..21: note = DNA
aggactttgaccatcagagtt

SEQ ID NO: 1305 - DNA, 21 bp, Rattus norvegicus
  source 1..21: mol_type = unassigned DNA
  modified_base 1: mod_base = OTHER; note = 2'-O-methyluridine-3'-phosphate
  modified_base 3: mod_base = OTHER; note = 2'-O-methylcytidine-3'-phosphate
  modified_base 4: mod_base = OTHER; note = 2'-O-methyluridine-3'-phosphate
  modified_base 6: mod_base = OTHER; note = 2'-O-methyluridine-3'-phosphate
  modified_base 7: mod_base = OTHER; note = 2'-O-methylcytidine-3'-phosphate
  modified_base 8: mod_base = OTHER; note = 2'-O-methylcytidine-3'-phosphate
  modified_base 13: mod_base = OTHER; note = 2'-O-methylcytidine-3'-phosphate
  modified_base 16: mod_base = OTHER; note = 2'-O-methylcytidine-3'-phosphate
  modified_base 17: mod_base = OTHER; note = 2'-O-methylcytidine-3'-phosphate
  modified_base 18: mod_base = OTHER; note = 2'-O-methylcytidine-3'-phosphate
  modified_base 19: mod_base = OTHER; note = 2'-O-methyluridine-3'-phosphate
  misc_feature 1..19: note = RNA
  misc_feature 20..21: note = DNA
tgctgtccgaggcagcccttt

SEQ ID NO: 1306 - DNA, 21 bp, Rattus norvegicus
  source 1..21: mol_type = unassigned DNA
  modified_base 15: mod_base = OTHER; note = 2'-O-methylcytidine-3'-phosphate
  modified_base 18: mod_base = OTHER; note = 2'-O-methylcytidine-3'-phosphate
  misc_feature 1..19: note = RNA
  misc_feature 20..21: note = DNA
agggctgcctcggacagcatt

SEQ ID NO: 1307 - DNA, 21 bp, Rattus norvegicus
  source 1..21: mol_type = unassigned DNA
  modified_base 2: mod_base = OTHER; note = 2'-O-methyluridine-3'-phosphate
  modified_base 3: mod_base = OTHER; note = 2'-O-methylcytidine-3'-phosphate
  modified_base 4: mod_base = OTHER; note = 2'-O-methyluridine-3'-phosphate
  modified_base 11: mod_base = OTHER; note = 2'-O-methylcytidine-3'-phosphate
  modified_base 12: mod_base = OTHER; note = 2'-O-methyluridine-3'-phosphate
  modified_base 14: mod_base = OTHER; note = 2'-O-methylcytidine-3'-phosphate
  modified_base 16: mod_base = OTHER; note = 2'-O-methylcytidine-3'-phosphate
  misc_feature 1..19: note = RNA
  misc_feature 20..21: note = DNA
gtctggagagctgcacgggtt

SEQ ID NO: 1308 - DNA, 21 bp, Rattus norvegicus
  source 1..21: mol_type = unassigned DNA
  modified_base 7: mod_base = OTHER; note = 2'-O-methylcytidine-3'-phosphate
  modified_base 15: mod_base = OTHER; note = 2'-O-methylcytidine-3'-phosphate
  misc_feature 1..19: note = RNA
  misc_feature 20..21: note = DNA
cccgtgcagctctccagactt

SEQ ID NO: 1309 - DNA, 21 bp, Rattus norvegicus
  source 1..21: mol_type = unassigned DNA
  modified_base 2: mod_base = OTHER; note = 2'-O-methylcytidine-3'-phosphate
  modified_base 5: mod_base = OTHER; note = 2'-O-methyluridine-3'-phosphate
  modified_base 7: mod_base = OTHER; note = 2'-O-methyluridine-3'-phosphate
  modified_base 8: mod_base = OTHER; note = 2'-O-methyluridine-3'-phosphate
  modified_base 9: mod_base = OTHER; note = 2'-O-methylcytidine-3'-phosphate
  modified_base 10: mod_base = OTHER; note = 2'-O-methyluridine-3'-phosphate
  modified_base 11: mod_base = OTHER; note = 2'-O-methyluridine-3'-phosphate
  modified_base 13: mod_base = OTHER; note = 2'-O-methylcytidine-3'-phosphate
  modified_base 14: mod_base = OTHER; note = 2'-O-methyluridine-3'-phosphate
  modified_base 15: mod_base = OTHER; note = 2'-O-methylcytidine-3'-phosphate
  modified_base 16: mod_base = OTHER; note = 2'-O-methyluridine-3'-phosphate
  modified_base 18: mod_base = OTHER; note = 2'-O-methyluridine-3'-phosphate
  misc_feature 1..19: note = RNA
  misc_feature 20..21: note = DNA
acagtgttcttgctctatatt

SEQ ID NO: 1310 - DNA, 21 bp, Rattus norvegicus
  source 1..21: mol_type = unassigned DNA
  modified_base 1: mod_base = OTHER; note = 2'-O-methyluridine-3'-phosphate
  modified_base 3: mod_base = OTHER; note = 2'-O-methyluridine-3'-phosphate
  modified_base 8: mod_base = OTHER; note = 2'-O-methylcytidine-3'-phosphate
  modified_base 14: mod_base = OTHER; note = 2'-O-methylcytidine-3'-phosphate
  misc_feature 1..19: note = RNA
  misc_feature 20..21: note = DNA
tatagagcaagaacactgttt

SEQ ID NO: 1311 - DNA, 21 bp, Rattus norvegicus
  source 1..21: mol_type = unassigned DNA
  modified_base 1: mod_base = OTHER; note = 2'-O-methylcytidine-3'-phosphate
  modified_base 2: mod_base = OTHER; note = 2'-O-methylcytidine-3'-phosphate
  modified_base 3: mod_base = OTHER; note = 2'-O-methyluridine-3'-phosphate
  modified_base 4: mod_base = OTHER; note = 2'-O-methylcytidine-3'-phosphate
  modified_base 5: mod_base = OTHER; note = 2'-O-methyluridine-3'-phosphate
  modified_base 8: mod_base = OTHER; note = 2'-O-methyluridine-3'-phosphate
  modified_base 11: mod_base = OTHER; note = 2'-O-methyluridine-3'-phosphate
  modified_base 12: mod_base = OTHER; note = 2'-O-methylcytidine-3'-phosphate
  modified_base 17: mod_base = OTHER; note = 2'-O-methyluridine-3'-phosphate
  modified_base 18: mod_base = OTHER; note = 2'-O-methylcytidine-3'-phosphate
  modified_base 19: mod_base = OTHER; note = 2'-O-methylcytidine-3'-phosphate
  misc_feature 1..19: note = RNA
  misc_feature 20..21: note = DNA
cctctgatggtcaaagtcctt

SEQ ID NO: 1312 - DNA, 21 bp, Rattus norvegicus
  source 1..21: mol_type = unassigned DNA
  modified_base 11: mod_base = OTHER; note = 2'-O-methylcytidine-3'-phosphate
  modified_base 14: mod_base = OTHER; note = 2'-O-methylcytidine-3'-phosphate
  misc_feature 1..19: note = RNA
  misc_feature 20..21: note = DNA
ggactttgaccatcagaggtt

SEQ ID NO: 1313 - DNA, 21 bp, Rattus norvegicus
  source 1..21: mol_type = unassigned DNA
  modified_base 3: mod_base = OTHER; note = 2'-O-methyluridine-3'-phosphate
  modified_base 4: mod_base = OTHER; note = 2'-O-methylcytidine-3'-phosphate
  modified_base 5: mod_base = OTHER; note = 2'-O-methylcytidine-3'-phosphate
  modified_base 6: mod_base = OTHER; note = 2'-O-methyluridine-3'-phosphate
  modified_base 10: mod_base = OTHER; note = 2'-O-methyluridine-3'-phosphate
  modified_base 12: mod_base = OTHER; note = 2'-O-methylcytidine-3'-phosphate
  modified_base 13: mod_base = OTHER; note = 2'-O-methyluridine-3'-phosphate
  modified_base 15: mod_base = OTHER; note = 2'-O-methyluridine-3'-phosphate
  modified_base 16: mod_base = OTHER; note = 2'-O-methylcytidine-3'-phosphate
  modified_base 17: mod_base = OTHER; note = 2'-O-methylcytidine-3'-phosphate
  misc_feature 1..19: note = RNA
  misc_feature 20..21: note = DNA
agtcctggatgctgtccgatt

SEQ ID NO: 1314 - DNA, 21 bp, Rattus norvegicus
  source 1..21: mol_type = unassigned DNA
  modified_base 6: mod_base = OTHER; note = 2'-O-methylcytidine-3'-phosphate
  modified_base 9: mod_base = OTHER; note = 2'-O-methylcytidine-3'-phosphate
  modified_base 13: mod_base = OTHER; note = 2'-O-methylcytidine-3'-phosphate
  misc_feature 1..19: note = RNA
  misc_feature 20..21: note = DNA
tcggacagcatccaggacttt

SEQ ID NO: 1315 - DNA, 21 bp, Rattus norvegicus
  source 1..21: mol_type = unassigned DNA
  modified_base 1: mod_base = OTHER; note = 2'-O-methyluridine-3'-phosphate
  modified_base 2: mod_base = OTHER; note = 2'-O-methyluridine-3'-phosphate
  modified_base 4: mod_base = OTHER; note = 2'-O-methylcytidine-3'-phosphate
  modified_base 5: mod_base = OTHER; note = 2'-O-methylcytidine-3'-phosphate
  modified_base 6: mod_base = OTHER; note = 2'-O-methyluridine-3'-phosphate
  modified_base 7: mod_base = OTHER; note = 2'-O-methylcytidine-3'-phosphate
  modified_base 8: mod_base = OTHER; note = 2'-O-methyluridine-3'-phosphate
  modified_base 16: mod_base = OTHER; note = 2'-O-methylcytidine-3'-phosphate
  modified_base 17: mod_base = OTHER; note = 2'-O-methylcytidine-3'-phosphate
  modified_base 19: mod_base = OTHER; note = 2'-O-methylcytidine-3'-phosphate
  misc_feature 1..19: note = RNA
  misc_feature 20..21: note = DNA
ttgcctctgggaagaccgctt

SEQ ID NO: 1316 - DNA, 21 bp, Rattus norvegicus
  source 1..21: mol_type = unassigned DNA
  modified_base 11: mod_base = OTHER; note = 2'-O-methylcytidine-3'-phosphate
  modified_base 17: mod_base = OTHER; note = 2'-O-methylcytidine-3'-phosphate
  misc_feature 1..19: note = RNA
  misc_feature 20..21: note = DNA
gcggtcttcccagaggcaatt

SEQ ID NO: 1317 - DNA, 21 bp, Rattus norvegicus
  source 1..21: mol_type = unassigned DNA
  modified_base 1: mod_base = OTHER; note = 2'-O-methyluridine-3'-phosphate
  modified_base 8: mod_base = OTHER; note = 2'-O-methylcytidine-3'-phosphate
  modified_base 9: mod_base = OTHER; note = 2'-O-methyluridine-3'-phosphate
  modified_base 11: mod_base = OTHER; note = 2'-O-methylcytidine-3'-phosphate
  modified_base 13: mod_base = OTHER; note = 2'-O-methylcytidine-3'-phosphate
  modified_base 17: mod_base = OTHER; note = 2'-O-methylcytidine-3'-phosphate
  modified_base 18: mod_base = OTHER; note = 2'-O-methyluridine-3'-phosphate
  modified_base 19: mod_base = OTHER; note = 2'-O-methylcytidine-3'-phosphate
  misc_feature 1..19: note = RNA
  misc_feature 20..21: note = DNA
tggagagctgcacgggctctt

SEQ ID NO: 1318 - DNA, 21 bp, Rattus norvegicus
  source 1..21: mol_type = unassigned DNA
  modified_base 10: mod_base = OTHER; note = 2'-O-methylcytidine-3'-phosphate
  modified_base 18: mod_base = OTHER; note = 2'-O-methylcytidine-3'-phosphate
  misc_feature 1..19: note = RNA
  misc_feature 20..21: note = DNA
gagcccgtgcagctctccatt

SEQ ID NO: 1319 - DNA, 21 bp, Rattus norvegicus
  source 1..21: mol_type = unassigned DNA
  modified_base 6: mod_base = OTHER; note = 2'-O-methylcytidine-3'-phosphate
  modified_base 7: mod_base = OTHER; note = 2'-O-methyluridine-3'-phosphate
  modified_base 9: mod_base = OTHER; note = 2'-O-methylcytidine-3'-phosphate
  modified_base 11: mod_base = OTHER; note = 2'-O-methylcytidine-3'-phosphate
  modified_base 15: mod_base = OTHER; note = 2'-O-methylcytidine-3'-phosphate
  modified_base 16: mod_base = OTHER; note = 2'-O-methyluridine-3'-phosphate
  modified_base 17: mod_base = OTHER; note = 2'-O-methylcytidine-3'-phosphate
  modified_base 19: mod_base = OTHER; note = 2'-O-methylcytidine-3'-phosphate
  misc_feature 1..19: note = RNA
  misc_feature 20..21: note = DNA
gagagctgcacgggctcactt

SEQ ID NO: 1320 - DNA, 21 bp, Rattus norvegicus
  source 1..21: mol_type = unassigned DNA
  modified_base 12: mod_base = OTHER; note = 2'-O-methylcytidine-3'-phosphate
  misc_feature 1..19: note = RNA
  misc_feature 20..21: note = DNA
gtgagcccgtgcagctctctt

SEQ ID NO: 1321 - DNA, 21 bp, Rattus norvegicus
  source 1..21: mol_type = unassigned DNA
  modified_base 4: mod_base = OTHER; note = 2'-O-methylcytidine-3'-phosphate
  modified_base 5: mod_base = OTHER; note = 2'-O-methyluridine-3'-phosphate
  modified_base 7: mod_base = OTHER; note = 2'-O-methylcytidine-3'-phosphate
  modified_base 9: mod_base = OTHER; note = 2'-O-methylcytidine-3'-phosphate
  modified_base 13: mod_base = OTHER; note = 2'-O-methylcytidine-3'-phosphate
  modified_base 14: mod_base = OTHER; note = 2'-O-methyluridine-3'-phosphate
  modified_base 15: mod_base = OTHER; note = 2'-O-methylcytidine-3'-phosphate
  modified_base 17: mod_base = OTHER; note = 2'-O-methylcytidine-3'-phosphate
  modified_base 18: mod_base = OTHER; note = 2'-O-methylcytidine-3'-phosphate
  misc_feature 1..19: note = RNA
  misc_feature 20..21: note = DNA
gagctgcacgggctcaccatt

SEQ ID NO: 1322 - DNA, 21 bp, Rattus norvegicus
  source 1..21: mol_type = unassigned DNA
  modified_base 14: mod_base = OTHER; note = 2'-O-methylcytidine-3'-phosphate
  misc_feature 1..19: note = RNA
  misc_feature 20..21: note = DNA
tggtgagcccgtgcagctctt

SEQ ID NO: 1323 - DNA, 21 bp, Rattus norvegicus
  source 1..21: mol_type = unassigned DNA
  modified_base 1: mod_base = OTHER; note = 2'-O-methyluridine-3'-phosphate
  modified_base 3: mod_base = OTHER; note = 2'-O-methylcytidine-3'-phosphate
  modified_base 5: mod_base = OTHER; note = 2'-O-methylcytidine-3'-phosphate
  modified_base 6: mod_base = OTHER; note = 2'-O-methylcytidine-3'-phosphate
  modified_base 8: mod_base = OTHER; note = 2'-O-methyluridine-3'-phosphate
  modified_base 9: mod_base = OTHER; note = 2'-O-methylcytidine-3'-phosphate
  modified_base 11: mod_base = OTHER; note = 2'-O-methylcytidine-3'-phosphate
  modified_base 14: mod_base = OTHER; note = 2'-O-methylcytidine-3'-phosphate
  modified_base 15: mod_base = OTHER; note = 2'-O-methylcytidine-3'-phosphate
  modified_base 16: mod_base = OTHER; note = 2'-O-methylcytidine-3'-phosphate
  modified_base 17: mod_base = OTHER; note = 2'-O-methyluridine-3'-phosphate
  modified_base 19: mod_base = OTHER; note = 2'-O-methylcytidine-3'-phosphate
  misc_feature 1..19: note = RNA
  misc_feature 20..21: note = DNA
tacaccatcgcagccctgctt

SEQ ID NO: 1324 - DNA, 21 bp, Rattus norvegicus
  source 1..21: mol_type = unassigned DNA
  modified_base 2: mod_base = OTHER; note = 2'-O-methylcytidine-3'-phosphate
  modified_base 18: mod_base = OTHER; note = 2'-O-methyluridine-3'-phosphate
  misc_feature 1..19: note = RNA
  misc_feature 20..21: note = DNA
gcagggctgcgatggtgtatt

SEQ ID NO: 1325 - DNA, 21 bp, Rattus norvegicus
  source 1..21: mol_type = unassigned DNA
  modified_base 2: mod_base = OTHER; note = 2'-O-methyluridine-3'-phosphate
  modified_base 3: mod_base = OTHER; note = 2'-O-methylcytidine-3'-phosphate
  modified_base 4: mod_base = OTHER; note = 2'-O-methylcytidine-3'-phosphate
  modified_base 5: mod_base = OTHER; note = 2'-O-methyluridine-3'-phosphate
  modified_base 9: mod_base = OTHER; note = 2'-O-methyluridine-3'-phosphate
  modified_base 11: mod_base = OTHER; note = 2'-O-methylcytidine-3'-phosphate
  modified_base 12: mod_base = OTHER; note = 2'-O-methyluridine-3'-phosphate
  modified_base 14: mod_base = OTHER; note = 2'-O-methyluridine-3'-phosphate
  modified_base 15: mod_base = OTHER; note = 2'-O-methylcytidine-3'-phosphate
  modified_base 16: mod_base = OTHER; note = 2'-O-methylcytidine-3'-phosphate
  misc_feature 1..19: note = RNA
  misc_feature 20..21: note = DNA
gtcctggatgctgtccgagtt

SEQ ID NO: 1326 - DNA, 21 bp, Rattus norvegicus
  source 1..21: mol_type = unassigned DNA
  modified_base 7: mod_base = OTHER; note = 2'-O-methylcytidine-3'-phosphate
  modified_base 10: mod_base = OTHER; note = 2'-O-methylcytidine-3'-phosphate
  modified_base 14: mod_base = OTHER; note = 2'-O-methylcytidine-3'-phosphate
  misc_feature 1..19: note = RNA
  misc_feature 20..21: note = DNA
ctcggacagcatccaggactt

SEQ ID NO: 1327 - DNA, 21 bp, Rattus norvegicus
  source 1..21: mol_type = unassigned DNA
  modified_base 5: mod_base = OTHER; note = 2'-O-methylcytidine-3'-phosphate
  modified_base 6: mod_base = OTHER; note = 2'-O-methyluridine-3'-phosphate
  modified_base 8: mod_base = OTHER; note = 2'-O-methylcytidine-3'-phosphate
  modified_base 10: mod_base = OTHER; note = 2'-O-methylcytidine-3'-phosphate
  modified_base 14: mod_base = OTHER; note = 2'-O-methylcytidine-3'-phosphate
  modified_base 15: mod_base = OTHER; note = 2'-O-methyluridine-3'-phosphate
  modified_base 16: mod_base = OTHER; note = 2'-O-methylcytidine-3'-phosphate
  modified_base 18: mod_base = OTHER; note = 2'-O-methylcytidine-3'-phosphate
  modified_base 19: mod_base = OTHER; note = 2'-O-methylcytidine-3'-phosphate
  misc_feature 1..19: note = RNA
  misc_feature 20..21: note = DNA
agagctgcacgggctcacctt

SEQ ID NO: 1328 - DNA, 21 bp, Rattus norvegicus
  source 1..21: mol_type = unassigned DNA
  modified_base 13: mod_base = OTHER; note = 2'-O-methylcytidine-3'-phosphate
  misc_feature 1..19: note = RNA
  misc_feature 20..21: note = DNA
ggtgagcccgtgcagctcttt

SEQ ID NO: 1329 - DNA, 650 bp, Homo sapiens
  source 1..650: mol_type = unassigned DNA
acagaagtccactcattcttggcaggatggcttctcatcgtctgctcctcctctgccttgctggactggtatttgtgtctgaggctggccctacgggcaccggtgaatccaagtgtcctctgatggtcaaagttctagatgctgtccgaggcagtcctgccatcaatgtggccgtgcatgtgttcagaaaggctgctgatgacacctgggagccatttgcctctgggaaaaccagtgagtctggagagctgcatgggctcacaactgaggaggaatttgtagaagggatatacaaagtggaaatagacaccaaatcttactggaaggcacttggcatctccccattccatgagcatgcagaggtggtattcacagccaacgactccggcccccgccgctacaccattgccgccctgctgagcccctactcctattccaccacggctgtcgtcaccaatcccaaggaatgagggacttctcctccagtggacctgaaggacgagggatgggatttcatgtaaccaagagtattccatttttactaaagcagtgttttcacctcatatgctatgttagaagtccaggcagagacaataaaacattcctgtgaaaggcacttttcattccaaaaaaaaaaaaaaaaaaaaaaa

SEQ ID NO: 1330 - DNA, 595 bp, Rattus norvegicus
  source 1..595: mol_type = unassigned DNA
cctgacaggatggcttcccttcgcctgttcctcctctgcctcgctggactgatatttgcgtctgaagctggccctgggggtgctggagaatccaagtgtcctctgatggtcaaagtcctggatgctgtccgaggcagccctgctgtcgatgtggccgtgaaagtgttcaaaaggactgcagacggaagctgggagccgtttgcctctgggaagaccgccgagtctggagagctgcacgggctcaccacagatgagaagttcacggaaggggtgtacagggtagaactggacaccaaatcatactggaaggctcttggcatttccccattccatgaatacgcagaggtggttttcacagccaatgactctggtcatcgccactacaccatcgcagccctgctcagcccgtactcctacagcaccactgctgtcgtcagtaacccccagaactgagggacccagcccacgaggaccaagatcttgccaaagcagtagctcccatttgtactgaaacagtgttcttgctctataaaccgtgttagcaactcgggaagatgccgtgaaacgttcttattaaaccacctttatttcattc

SEQ ID NO: 1331 - DNA, 938 bp, Homo sapiens
  source 1..938: mol_type = unassigned DNA
gttgactaagtcaataatcagaatcagcaggtttgcagtcagattggcagggataagcagcctagctcaggagaagtgagtataaaagccccaggctgggagcagccatcacagaagtccactcattcttggcaggatggcttctcatcgtctgctcctcctctgccttgctggactggtatttgtgtctgaggctggccctacgggcaccggtgaatccaagtgtcctctgatggtcaaagttctagatgctgtccgaggcagtcctgccatcaatgtggccgtgcatgtgttcagaaaggctgctgatgacacctgggagccatttgcctctgggaaaaccagtgagtctggagagctgcatgggctcacaactgaggaggaatttgtagaagggatatacaaagtggaaatagacaccaaatcttactggaaggcacttggcatctccccattccatgagcatgcagaggtggtattcacagccaacgactccggcccccgccgctacaccattgccgccctgctgagcccctactcctattccaccacggctgtcgtcaccaatcccaaggaatgagggacttctcctccagtggacctgaaggacgagggatgggatttcatgtaaccaagagtattccatttttactaaagcagtgttttcacctcatatgctatgttagaagtccaggcagagacaataaaacattcctgtgaaaggcacttttcattccactttaacttgattttttaaattcccttattgtcccttccaaaaaaaagagaatcaaaattttacaaagaatcaaaggaattctagaaagtatctgggcagaacgctaggagagatccaaatttccattgtcttgcaagcaaagcacgtattaaatatgatctgcagccattaaaaagacacattctgtaaaaaaaaaaaa

SEQ ID NO: 1332 - DNA, 21 bp, Homo sapiens
  source 1..21: mol_type = unassigned DNA
  modified_base 5: mod_base = OTHER; note = 2'-O-methyluridine-3'-phosphate
  modified_base 6: mod_base = OTHER; note = 2'-O-methyluridine-3'-phosphate
  modified_base 7: mod_base = OTHER; note = 2'-O-methyluridine-3'-phosphate
  modified_base 8: mod_base = OTHER; note = 2'-O-methylcytidine-3'-phosphate
  modified_base 10: mod_base = OTHER; note = 2'-O-methyluridine-3'-phosphate
  modified_base 12: mod_base = OTHER; note = 2'-O-methyluridine-3'-phosphate
  modified_base 15: mod_base = OTHER; note = 2'-O-methylcytidine-3'-phosphate
  modified_base 16: mod_base = OTHER; note = 2'-O-methylcytidine-3'-phosphate
  misc_feature 1..19: note = RNA
  misc_feature 20..21: note = DNA
gggatttcatgtaaccaagtt

SEQ ID NO: 1333 - DNA, 21 bp, Homo sapiens
  source 1..21: mol_type = unassigned DNA
  modified_base 7: mod_base = OTHER; note = 2'-O-methyluridine-3'-phosphate
  modified_base 9: mod_base = OTHER; note = 2'-O-methylcytidine-3'-phosphate
  misc_feature 1..19: note = RNA
  misc_feature 20..21: note = DNA
cttggttacatgaaatccctt

SEQ ID NO: 1334 - DNA, 21 bp, Homo sapiens
  source 1..21: mol_type = unassigned DNA
  modified_base 4: mod_base = OTHER; note = 2'-O-methyluridine-3'-phosphate
  modified_base 5: mod_base = OTHER; note = 2'-O-methyluridine-3'-phosphate
  modified_base 6: mod_base = OTHER; note = 2'-O-methyluridine-3'-phosphate
  modified_base 7: mod_base = OTHER; note = 2'-O-methylcytidine-3'-phosphate
  modified_base 9: mod_base = OTHER; note = 2'-O-methyluridine-3'-phosphate
  modified_base 11: mod_base = OTHER; note = 2'-O-methyluridine-3'-phosphate
  modified_base 14: mod_base = OTHER; note = 2'-O-methylcytidine-3'-phosphate
  modified_base 15: mod_base = OTHER; note = 2'-O-methylcytidine-3'-phosphate
  misc_feature 1..19: note = RNA
  misc_feature 20..21: note = DNA
ggatttcatgtaaccaagatt

SEQ ID NO: 1335 - DNA, 21 bp, Homo sapiens
  source 1..21: mol_type = unassigned DNA
  modified_base 8: mod_base = OTHER; note = 2'-O-methyluridine-3'-phosphate
  modified_base 10: mod_base = OTHER; note = 2'-O-methylcytidine-3'-phosphate
  misc_feature 1..19: note = RNA
  misc_feature 20..21: note = DNA
tcttggttacatgaaatcctt

SEQ ID NO: 1336 - DNA, 21 bp, Homo sapiens
  source 1..21: mol_type = unassigned DNA
  modified_base 3: mod_base = OTHER; note = 2'-O-methyluridine-3'-phosphate
  modified_base 4: mod_base = OTHER; note = 2'-O-methyluridine-3'-phosphate
  modified_base 5: mod_base = OTHER; note = 2'-O-methyluridine-3'-phosphate
  modified_base 6: mod_base = OTHER; note = 2'-O-methylcytidine-3'-phosphate
  modified_base 8: mod_base = OTHER; note = 2'-O-methyluridine-3'-phosphate
  modified_base 10: mod_base = OTHER; note = 2'-O-methyluridine-3'-phosphate
  modified_base 13: mod_base = OTHER; note = 2'-O-methylcytidine-3'-phosphate
  modified_base 14: mod_base = OTHER; note = 2'-O-methylcytidine-3'-phosphate
  misc_feature 1..19: note = RNA
  misc_feature 20..21: note = DNA
gatttcatgtaaccaagagtt

SEQ ID NO: 1337 - DNA, 21 bp, Homo sapiens
  source 1..21: mol_type = unassigned DNA
  modified_base 9: mod_base = OTHER; note = 2'-O-methyluridine-3'-phosphate
  modified_base 11: mod_base = OTHER; note = 2'-O-methylcytidine-3'-phosphate
  misc_feature 1..19: note = RNA
  misc_feature 20..21: note = DNA
ctcttggttacatgaaatctt

SEQ ID NO: 1338 - DNA, 21 bp, Homo sapiens
  source 1..21: mol_type = unassigned DNA
  modified_base 2: mod_base = OTHER; note = 2'-O-methyluridine-3'-phosphate
  modified_base 3: mod_base = OTHER; note = 2'-O-methyluridine-3'-phosphate
  modified_base 4: mod_base = OTHER; note = 2'-O-methyluridine-3'-phosphate
  modified_base 5: mod_base = OTHER; note = 2'-O-methylcytidine-3'-phosphate
  modified_base 7: mod_base = OTHER; note = 2'-O-methyluridine-3'-phosphate
  modified_base 9: mod_base = OTHER; note = 2'-O-methyluridine-3'-phosphate
  modified_base 12: mod_base = OTHER; note = 2'-O-methylcytidine-3'-phosphate
  modified_base 13: mod_base = OTHER; note = 2'-O-methylcytidine-3'-phosphate
  modified_base 19: mod_base = OTHER; note = 2'-O-methyluridine-3'-phosphate
  misc_feature 1..19: note = RNA
  misc_feature 20..21: note = DNA
atttcatgtaaccaagagttt

SEQ ID NO: 1339 - DNA, 21 bp, Homo sapiens
  source 1..21: mol_type = unassigned DNA
  modified_base 10: mod_base = OTHER; note = 2'-O-methyluridine-3'-phosphate
  modified_base 12: mod_base = OTHER; note = 2'-O-methylcytidine-3'-phosphate
  misc_feature 1..19: note = RNA
  misc_feature 20..21: note = DNA
actcttggttacatgaaattt

SEQ ID NO: 1340 - DNA, 21 bp, Homo sapiens
  source 1..21: mol_type = unassigned DNA
  modified_base 1: mod_base = OTHER; note = 2'-O-methyluridine-3'-phosphate
  modified_base 2: mod_base = OTHER; note = 2'-O-methyluridine-3'-phosphate
  modified_base 3: mod_base = OTHER; note = 2'-O-methyluridine-3'-phosphate
  modified_base 4: mod_base = OTHER; note = 2'-O-methylcytidine-3'-phosphate
  modified_base 6: mod_base = OTHER; note = 2'-O-methyluridine-3'-phosphate
  modified_base 8: mod_base = OTHER; note = 2'-O-methyluridine-3'-phosphate
  modified_base 11: mod_base = OTHER; note = 2'-O-methylcytidine-3'-phosphate
  modified_base 12: mod_base = OTHER; note = 2'-O-methylcytidine-3'-phosphate
  modified_base 18: mod_base = OTHER; note = 2'-O-methyluridine-3'-phosphate
  misc_feature 1..19: note = RNA
  misc_feature 20..21: note = DNA
tttcatgtaaccaagagtatt

SEQ ID NO: 1341 - DNA, 21 bp, Homo sapiens
  source 1..21: mol_type = unassigned DNA
  modified_base 1: mod_base = OTHER; note = 2'-O-methyluridine-3'-phosphate
  modified_base 11: mod_base = OTHER; note = 2'-O-methyluridine-3'-phosphate
  modified_base 13: mod_base = OTHER; note = 2'-O-methylcytidine-3'-phosphate
  misc_feature 1..19: note = RNA
  misc_feature 20..21: note = DNA
tactcttggttacatgaaatt

SEQ ID NO: 1342 - DNA, 21 bp, Homo sapiens
  source 1..21: mol_type = unassigned DNA
  modified_base 1: mod_base = OTHER; note = 2'-O-methyluridine-3'-phosphate
  modified_base 2: mod_base = OTHER; note = 2'-O-methyluridine-3'-phosphate
  modified_base 3: mod_base = OTHER; note = 2'-O-methylcytidine-3'-phosphate
  modified_base 5: mod_base = OTHER; note = 2'-O-methyluridine-3'-phosphate
  modified_base 7: mod_base = OTHER; note = 2'-O-methyluridine-3'-phosphate
  modified_base 10: mod_base = OTHER; note = 2'-O-methylcytidine-3'-phosphate
  modified_base 11: mod_base = OTHER; note = 2'-O-methylcytidine-3'-phosphate
  modified_base 17: mod_base = OTHER; note = 2'-O-methyluridine-3'-phosphate
  modified_base 19: mod_base = OTHER; note = 2'-O-methyluridine-3'-phosphate
  misc_feature 1..19: note = RNA
  misc_feature 20..21: note = DNA
ttcatgtaaccaagagtattt

SEQ ID NO: 1343 - DNA, 21 bp, Homo sapiens
  source 1..21: mol_type = unassigned DNA
  modified_base 2: mod_base = OTHER; note = 2'-O-methyluridine-3'-phosphate
  modified_base 12: mod_base = OTHER; note = 2'-O-methyluridine-3'-phosphate
  modified_base 14: mod_base = OTHER; note = 2'-O-methylcytidine-3'-phosphate
  misc_feature 1..19: note = RNA
  misc_feature 20..21: note = DNA
atactcttggttacatgaatt

SEQ ID NO: 1344 - DNA, 21 bp, Homo sapiens
  source 1..21: mol_type = unassigned DNA
  modified_base 1: mod_base = OTHER; note = 2'-O-methyluridine-3'-phosphate
  modified_base 2: mod_base = OTHER; note = 2'-O-methylcytidine-3'-phosphate
  modified_base 4: mod_base = OTHER; note = 2'-O-methyluridine-3'-phosphate
  modified_base 6: mod_base = OTHER; note = 2'-O-methyluridine-3'-phosphate
  modified_base 9: mod_base = OTHER; note = 2'-O-methylcytidine-3'-phosphate
  modified_base 10: mod_base = OTHER; note = 2'-O-methylcytidine-3'-phosphate
  modified_base 16: mod_base = OTHER; note = 2'-O-methyluridine-3'-phosphate
  modified_base 18: mod_base = OTHER; note = 2'-O-methyluridine-3'-phosphate
  modified_base 19: mod_base = OTHER; note = 2'-O-methyluridine-3'-phosphate
  misc_feature 1..19: note = RNA
  misc_feature 20..21: note = DNA
tcatgtaaccaagagtatttt

SEQ ID NO: 1345 - DNA, 21 bp, Homo sapiens
  source 1..21: mol_type = unassigned DNA
  modified_base 3: mod_base = OTHER; note = 2'-O-methyluridine-3'-phosphate
  modified_base 13: mod_base = OTHER; note = 2'-O-methyluridine-3'-phosphate
  modified_base 15: mod_base = OTHER; note = 2'-O-methylcytidine-3'-phosphate
  misc_feature 1..19: note = RNA
  misc_feature 20..21: note = DNA
aatactcttggttacatgatt

SEQ ID NO: 1346 - DNA, 21 bp, Homo sapiens
  source 1..21: mol_type = unassigned DNA
  modified_base 1: mod_base = OTHER; note = 2'-O-methylcytidine-3'-phosphate
  modified_base 3: mod_base = OTHER; note = 2'-O-methyluridine-3'-phosphate
  modified_base 5: mod_base = OTHER; note = 2'-O-methyluridine-3'-phosphate
  modified_base 8: mod_base = OTHER; note = 2'-O-methylcytidine-3'-phosphate
  modified_base 9: mod_base = OTHER; note = 2'-O-methylcytidine-3'-phosphate
  modified_base 15: mod_base = OTHER; note = 2'-O-methyluridine-3'-phosphate
  modified_base 17: mod_base = OTHER; note = 2'-O-methyluridine-3'-phosphate
  modified_base 18: mod_base = OTHER; note = 2'-O-methyluridine-3'-phosphate
  modified_base 19: mod_base = OTHER; note = 2'-O-methylcytidine-3'-phosphate
  misc_feature 1..19: note = RNA
  misc_feature 20..21: note = DNA
catgtaaccaagagtattctt

SEQ ID NO: 1347 - DNA, 21 bp, Homo sapiens
  source 1..21: mol_type = unassigned DNA
  modified_base 4: mod_base = OTHER; note = 2'-O-methyluridine-3'-phosphate
  modified_base 14: mod_base = OTHER; note = 2'-O-methyluridine-3'-phosphate
  modified_base 16: mod_base = OTHER; note = 2'-O-methylcytidine-3'-phosphate
  misc_feature 1..19: note = RNA
  misc_feature 20..21: note = DNA
gaatactcttggttacatgtt

SEQ ID NO: 1348 - DNA, 21 bp, Homo sapiens
  source 1..21: mol_type = unassigned DNA
  modified_base 2: mod_base = OTHER; note = 2'-O-methyluridine-3'-phosphate
  modified_base 4: mod_base = OTHER; note = 2'-O-methyluridine-3'-phosphate
  modified_base 7: mod_base = OTHER; note = 2'-O-methylcytidine-3'-phosphate
  modified_base 8: mod_base = OTHER; note = 2'-O-methylcytidine-3'-phosphate
  modified_base 14: mod_base = OTHER; note = 2'-O-methyluridine-3'-phosphate
  modified_base 16: mod_base = OTHER; note = 2'-O-methyluridine-3'-phosphate
  modified_base 17: mod_base = OTHER; note = 2'-O-methyluridine-3'-phosphate
  modified_base 18: mod_base = OTHER; note = 2'-O-methylcytidine-3'-phosphate
  modified_base 19: mod_base = OTHER; note = 2'-O-methylcytidine-3'-phosphate
  misc_feature 1..19: note = RNA
  misc_feature 20..21: note = DNA
atgtaaccaagagtattcctt

SEQ ID NO: 1349 - DNA, 21 bp, Homo sapiens
  source 1..21: mol_type = unassigned DNA
  modified_base 5: mod_base = OTHER; note = 2'-O-methyluridine-3'-phosphate
  modified_base 15: mod_base = OTHER; note = 2'-O-methyluridine-3'-phosphate
  modified_base 17: mod_base = OTHER; note = 2'-O-methylcytidine-3'-phosphate
  misc_feature 1..19: note = RNA
  misc_feature 20..21: note = DNA
ggaatactcttggttacattt

SEQ ID NO: 1350 - DNA, 21 bp, Homo sapiens
  source 1..21: mol_type = unassigned DNA
  modified_base 1: mod_base = OTHER; note = 2'-O-methyluridine-3'-phosphate
  modified_base 3: mod_base = OTHER; note = 2'-O-methyluridine-3'-phosphate
  modified_base 6: mod_base = OTHER; note = 2'-O-methylcytidine-3'-phosphate
  modified_base 7: mod_base = OTHER; note = 2'-O-methylcytidine-3'-phosphate
  modified_base 13: mod_base = OTHER; note = 2'-O-methyluridine-3'-phosphate
  modified_base 15: mod_base = OTHER; note = 2'-O-methyluridine-3'-phosphate
  modified_base 16: mod_base = OTHER; note = 2'-O-methyluridine-3'-phosphate
  modified_base 17: mod_base = OTHER; note = 2'-O-methylcytidine-3'-phosphate
  modified_base 18: mod_base = OTHER; note = 2'-O-methylcytidine-3'-phosphate
  misc_feature 1..19: note = RNA
  misc_feature 20..21: note = DNA
tgtaaccaagagtattccatt

SEQ ID NO: 1351 - DNA, 21 bp, Homo sapiens
  source 1..21: mol_type = unassigned DNA
  modified_base 6: mod_base = OTHER; note = 2'-O-methyluridine-3'-phosphate
  modified_base 16: mod_base = OTHER; note = 2'-O-methyluridine-3'-phosphate
  modified_base 18: mod_base = OTHER; note = 2'-O-methylcytidine-3'-phosphate
  misc_feature 1..19: note = RNA
  misc_feature 20..21: note = DNA
tggaatactcttggttacatt

SEQ ID NO: 1352 - DNA, 21 bp, Homo sapiens
  source 1..21: mol_type = unassigned DNA
  modified_base 1: mod_base = OTHER; note = 2'-O-methyluridine-3'-phosphate
  modified_base 4: mod_base = OTHER; note = 2'-O-methylcytidine-3'-phosphate
  modified_base 5: mod_base = OTHER; note = 2'-O-methylcytidine-3'-phosphate
  modified_base 11: mod_base = OTHER; note = 2'-O-methyluridine-3'-phosphate
  modified_base 13: mod_base = OTHER; note = 2'-O-methyluridine-3'-phosphate
  modified_base 14: mod_base = OTHER; note = 2'-O-methyluridine-3'-phosphate
  modified_base 15: mod_base = OTHER; note = 2'-O-methylcytidine-3'-phosphate
  modified_base 16: mod_base = OTHER; note = 2'-O-methylcytidine-3'-phosphate
  modified_base 18: mod_base = OTHER; note = 2'-O-methyluridine-3'-phosphate
  modified_base 19: mod_base = OTHER; note = 2'-O-methyluridine-3'-phosphate
  misc_feature 1..19: note = RNA
  misc_feature 20..21: note = DNA
taaccaagagtattccatttt

SEQ ID NO: 1353 - DNA, 21 bp, Homo sapiens
  source 1..21: mol_type = unassigned DNA
  modified_base 8: mod_base = OTHER; note = 2'-O-methyluridine-3'-phosphate
  modified_base 18: mod_base = OTHER; note = 2'-O-methyluridine-3'-phosphate
  misc_feature 1..19: note = RNA
  misc_feature 20..21: note = DNA
aatggaatactcttggttatt

SEQ ID NO: 1354 - DNA, 21 bp, Homo sapiens
  source 1..21: mol_type = unassigned DNA
  modified_base 3: mod_base = OTHER; note = 2'-O-methylcytidine-3'-phosphate
  modified_base 4: mod_base = OTHER; note = 2'-O-methylcytidine-3'-phosphate
  modified_base 10: mod_base = OTHER; note = 2'-O-methyluridine-3'-phosphate
  modified_base 12: mod_base = OTHER; note = 2'-O-methyluridine-3'-phosphate
  modified_base 13: mod_base = OTHER; note = 2'-O-methyluridine-3'-phosphate
  modified_base 14: mod_base = OTHER; note = 2'-O-methylcytidine-3'-phosphate
  modified_base 15: mod_base = OTHER; note = 2'-O-methylcytidine-3'-phosphate
  modified_base 17: mod_base = OTHER; note = 2'-O-methyluridine-3'-phosphate
  modified_base 18: mod_base = OTHER; note = 2'-O-methyluridine-3'-phosphate
  modified_base 19: mod_base = OTHER; note = 2'-O-methyluridine-3'-phosphate
  misc_feature 1..19: note = RNA
  misc_feature 20..21: note = DNA
aaccaagagtattccattttt

SEQ ID NO: 1355 - DNA, 21 bp, Homo sapiens
  source 1..21: mol_type = unassigned DNA
  modified_base 9: mod_base = OTHER; note = 2'-O-methyluridine-3'-phosphate
  misc_feature 1..19: note = RNA
  misc_feature 20..21: note = DNA
aaatggaatactcttggtttt

SEQ ID NO: 1356 - DNA, 21 bp, Homo sapiens
  source 1..21: mol_type = unassigned DNA
  modified_base 2: mod_base = OTHER; note = 2'-O-methylcytidine-3'-phosphate
  modified_base 3: mod_base = OTHER; note = 2'-O-methylcytidine-3'-phosphate
  modified_base 9: mod_base = OTHER; note = 2'-O-methyluridine-3'-phosphate
  modified_base 11: mod_base = OTHER; note = 2'-O-methyluridine-3'-phosphate
  modified_base 12: mod_base = OTHER; note = 2'-O-methyluridine-3'-phosphate
  modified_base 13: mod_base = OTHER; note = 2'-O-methylcytidine-3'-phosphate
  modified_base 14: mod_base = OTHER; note = 2'-O-methylcytidine-3'-phosphate
  modified_base 16: mod_base = OTHER; note = 2'-O-methyluridine-3'-phosphate
  modified_base 17: mod_base = OTHER; note = 2'-O-methyluridine-3'-phosphate
  modified_base 18: mod_base = OTHER; note = 2'-O-methyluridine-3'-phosphate
  modified_base 19: mod_base = OTHER; note = 2'-O-methyluridine-3'-phosphate
  misc_feature 1..19: note = RNA
  misc_feature 20..21: note = DNA
accaagagtattccatttttt

SEQ ID NO: 1357 - DNA, 21 bp, Homo sapiens
  source 1..21: mol_type = unassigned DNA
  modified_base 10: mod_base = OTHER; note = 2'-O-methyluridine-3'-phosphate
  misc_feature 1..19: note = RNA
  misc_feature 20..21: note = DNA
aaaatggaatactcttggttt

SEQ ID NO: 1358 - DNA, 21 bp, Homo sapiens
  source 1..21: mol_type = unassigned DNA
  modified_base 1: mod_base = OTHER; note = 2'-O-methylcytidine-3'-phosphate
  modified_base 2: mod_base = OTHER; note = 2'-O-methylcytidine-3'-phosphate
  modified_base 8: mod_base = OTHER; note = 2'-O-methyluridine-3'-phosphate
  modified_base 10: mod_base = OTHER; note = 2'-O-methyluridine-3'-phosphate
  modified_base 11: mod_base = OTHER; note = 2'-O-methyluridine-3'-phosphate
  modified_base 12: mod_base = OTHER; note = 2'-O-methylcytidine-3'-phosphate
  modified_base 13: mod_base = OTHER; note = 2'-O-methylcytidine-3'-phosphate
  modified_base 15: mod_base = OTHER; note = 2'-O-methyluridine-3'-phosphate
  modified_base 16: mod_base = OTHER; note = 2'-O-methyluridine-3'-phosphate
  modified_base 17: mod_base = OTHER; note = 2'-O-methyluridine-3'-phosphate
  modified_base 18: mod_base = OTHER; note = 2'-O-methyluridine-3'-phosphate
  modified_base 19: mod_base = OTHER; note = 2'-O-methyluridine-3'-phosphate
  misc_feature 1..19: note = RNA
  misc_feature 20..21: note = DNA
ccaagagtattccattttttt

SEQ ID NO: 1359 - DNA, 21 bp, Homo sapiens
  source 1..21: mol_type = unassigned DNA
  modified_base 11: mod_base = OTHER; note = 2'-O-methyluridine-3'-phosphate
  misc_feature 1..19: note = RNA
  misc_feature 20..21: note = DNA
aaaaatggaatactcttggtt

SEQ ID NO: 1360 - DNA, 21 bp, Homo sapiens
  source 1..21: mol_type = unassigned DNA
  modified_base 1: mod_base = OTHER; note = 2'-O-methylcytidine-3'-phosphate
  modified_base 7: mod_base = OTHER; note = 2'-O-methyluridine-3'-phosphate
  modified_base 9: mod_base = OTHER; note = 2'-O-methyluridine-3'-phosphate
  modified_base 10: mod_base = OTHER; note = 2'-O-methyluridine-3'-phosphate
  modified_base 11: mod_base = OTHER; note = 2'-O-methylcytidine-3'-phosphate
  modified_base 12: mod_base = OTHER; note = 2'-O-methylcytidine-3'-phosphate
  modified_base 14: mod_base = OTHER; note = 2'-O-methyluridine-3'-phosphate
  modified_base 15: mod_base = OTHER; note = 2'-O-methyluridine-3'-phosphate
  modified_base 16: mod_base = OTHER; note = 2'-O-methyluridine-3'-phosphate
  modified_base 17: mod_base = OTHER; note = 2'-O-methyluridine-3'-phosphate
  modified_base 18: mod_base = OTHER; note = 2'-O-methyluridine-3'-phosphate
  misc_feature 1..19: note = RNA
  misc_feature 20..21: note = DNA
caagagtattccatttttatt

SEQ ID NO: 1361 - DNA, 21 bp, Homo sapiens
  source 1..21: mol_type = unassigned DNA
  modified_base 1: mod_base = OTHER; note = 2'-O-methyluridine-3'-phosphate
  modified_base 12: mod_base = OTHER; note = 2'-O-methyluridine-3'-phosphate
  misc_feature 1..19: note = RNA
  misc_feature 20..21: note = DNA
taaaaatggaatactcttgtt

SEQ ID NO: 1362 - DNA, 21 bp, Homo sapiens
  source 1..21: mol_type = unassigned DNA
  modified_base 6: mod_base = OTHER; note = 2'-O-methyluridine-3'-phosphate
  modified_base 8: mod_base = OTHER; note = 2'-O-methyluridine-3'-phosphate
  modified_base 9: mod_base = OTHER; note = 2'-O-methyluridine-3'-phosphate
  modified_base 10: mod_base = OTHER; note = 2'-O-methylcytidine-3'-phosphate
  modified_base 11: mod_base = OTHER; note = 2'-O-methylcytidine-3'-phosphate
  modified_base 13: mod_base = OTHER; note = 2'-O-methyluridine-3'-phosphate
  modified_base 14: mod_base = OTHER; note = 2'-O-methyluridine-3'-phosphate
  modified_base 15: mod_base = OTHER; note = 2'-O-methyluridine-3'-phosphate
  modified_base 16: mod_base = OTHER; note = 2'-O-methyluridine-3'-phosphate
  modified_base 17: mod_base = OTHER; note = 2'-O-methyluridine-3'-phosphate
  modified_base 19: mod_base = OTHER; note = 2'-O-methylcytidine-3'-phosphate
  misc_feature 1..19: note = RNA
  misc_feature 20..21: note = DNA
aagagtattccatttttactt

SEQ ID NO: 1363 - DNA, 21 bp, Homo sapiens
  source 1..21: mol_type = unassigned DNA
  modified_base 2: mod_base = OTHER; note = 2'-O-methyluridine-3'-phosphate
  modified_base 13: mod_base = OTHER; note = 2'-O-methyluridine-3'-phosphate
  misc_feature 1..19: note = RNA
  misc_feature 20..21: note = DNA
gtaaaaatggaatactctttt

SEQ ID NO: 1364 - DNA, 21 bp, Homo sapiens
  source 1..21: mol_type = unassigned DNA
  modified_base 5: mod_base = OTHER; note = 2'-O-methyluridine-3'-phosphate
  modified_base 7: mod_base = OTHER; note = 2'-O-methyluridine-3'-phosphate
  modified_base 8: mod_base = OTHER; note = 2'-O-methyluridine-3'-phosphate
  modified_base 9: mod_base = OTHER; note = 2'-O-methylcytidine-3'-phosphate
  modified_base 10: mod_base = OTHER; note = 2'-O-methylcytidine-3'-phosphate
  modified_base 12: mod_base = OTHER; note = 2'-O-methyluridine-3'-phosphate
  modified_base 13: mod_base = OTHER; note = 2'-O-methyluridine-3'-phosphate
  modified_base 14: mod_base = OTHER; note = 2'-O-methyluridine-3'-phosphate
  modified_base 15: mod_base = OTHER; note = 2'-O-methyluridine-3'-phosphate
  modified_base 16: mod_base = OTHER; note = 2'-O-methyluridine-3'-phosphate
  modified_base 18: mod_base = OTHER; note = 2'-O-methylcytidine-3'-phosphate
  modified_base 19: mod_base = OTHER; note = 2'-O-methyluridine-3'-phosphate
  misc_feature 1..19: note = RNA
  misc_feature 20..21: note = DNA
agagtattccatttttacttt

SEQ ID NO: 1365 - DNA, 21 bp, Homo sapiens
  source 1..21: mol_type = unassigned DNA
  modified_base 3: mod_base = OTHER; note = 2'-O-methyluridine-3'-phosphate
  modified_base 14: mod_base = OTHER; note = 2'-O-methyluridine-3'-phosphate
  misc_feature 1..19: note = RNA
  misc_feature 20..21: note = DNA
agtaaaaatggaatactcttt

SEQ ID NO: 1366 - DNA, 21 bp, Homo sapiens
  source 1..21: mol_type = unassigned DNA
  modified_base 4: mod_base = OTHER; note = 2'-O-methyluridine-3'-phosphate
  modified_base 6: mod_base = OTHER; note = 2'-O-methyluridine-3'-phosphate
  modified_base 7: mod_base = OTHER; note = 2'-O-methyluridine-3'-phosphate
  modified_base 8: mod_base = OTHER; note = 2'-O-methylcytidine-3'-phosphate
  modified_base 9: mod_base = OTHER; note = 2'-O-methylcytidine-3'-phosphate
  modified_base 11: mod_base = OTHER; note = 2'-O-methyluridine-3'-phosphate
  modified_base 12: mod_base = OTHER; note = 2'-O-methyluridine-3'-phosphate
  modified_base 13: mod_base = OTHER; note = 2'-O-methyluridine-3'-phosphate
  modified_base 14: mod_base = OTHER; note = 2'-O-methyluridine-3'-phosphate
  modified_base 15: mod_base = OTHER; note = 2'-O-methyluridine-3'-phosphate
  modified_base 17: mod_base = OTHER; note = 2'-O-methylcytidine-3'-phosphate
  modified_base 18: mod_base = OTHER; note = 2'-O-methyluridine-3'-phosphate
  misc_feature 1..19: note = RNA
  misc_feature 20..21: note = DNA
gagtattccatttttactatt

SEQ ID NO: 1367 - DNA, 21 bp, Homo sapiens
  source 1..21: mol_type = unassigned DNA
  modified_base 1: mod_base = OTHER; note = 2'-O-methyluridine-3'-phosphate
  modified_base 4: mod_base = OTHER; note = 2'-O-methyluridine-3'-phosphate
  modified_base 15: mod_base = OTHER; note = 2'-O-methyluridine-3'-phosphate
  misc_feature 1..19: note = RNA
  misc_feature 20..21: note = DNA
tagtaaaaatggaatactctt

SEQ ID NO: 1368 - DNA, 21 bp, Homo sapiens
  source 1..21: mol_type = unassigned DNA
  modified_base 3: mod_base = OTHER; note = 2'-O-methyluridine-3'-phosphate
  modified_base 5: mod_base = OTHER; note = 2'-O-methyluridine-3'-phosphate
  modified_base 6: mod_base = OTHER; note = 2'-O-methyluridine-3'-phosphate
  modified_base 7: mod_base = OTHER; note = 2'-O-methylcytidine-3'-phosphate
  modified_base 8: mod_base = OTHER; note = 2'-O-methylcytidine-3'-phosphate
  modified_base 10: mod_base = OTHER; note = 2'-O-methyluridine-3'-phosphate
  modified_base 11: mod_base = OTHER; note = 2'-O-methyluridine-3'-phosphate
  modified_base 12: mod_base = OTHER; note = 2'-O-methyluridine-3'-phosphate
  modified_base 13: mod_base = OTHER; note = 2'-O-methyluridine-3'-phosphate
  modified_base 14: mod_base = OTHER; note = 2'-O-methyluridine-3'-phosphate
  modified_base 16: mod_base = OTHER; note = 2'-O-methylcytidine-3'-phosphate
  modified_base 17: mod_base = OTHER; note = 2'-O-methyluridine-3'-phosphate
  misc_feature 1..19: note = RNA
  misc_feature 20..21: note = DNA
agtattccatttttactaatt

SEQ ID NO: 1369 - DNA, 21 bp, Homo sapiens
  source 1..21: mol_type = unassigned DNA
  modified_base 2: mod_base = OTHER; note = 2'-O-methyluridine-3'-phosphate
  modified_base 5: mod_base = OTHER; note = 2'-O-methyluridine-3'-phosphate
  modified_base 16: mod_base = OTHER; note = 2'-O-methyluridine-3'-phosphate
  misc_feature 1..19: note = RNA
  misc_feature 20..21: note = DNA
ttagtaaaaatggaatacttt

SEQ ID NO: 1370 - DNA, 21 bp, Homo sapiens
  source 1..21: mol_type = unassigned DNA
  modified_base 2: mod_base = OTHER; note = 2'-O-methyluridine-3'-phosphate
  modified_base 4: mod_base = OTHER; note = 2'-O-methyluridine-3'-phosphate
  modified_base 5: mod_base = OTHER; note = 2'-O-methyluridine-3'-phosphate
  modified_base 6: mod_base = OTHER; note = 2'-O-methylcytidine-3'-phosphate
  modified_base 7: mod_base = OTHER; note = 2'-O-methylcytidine-3'-phosphate
  modified_base 9: mod_base = OTHER; note = 2'-O-methyluridine-3'-phosphate
  modified_base 10: mod_base = OTHER; note = 2'-O-methyluridine-3'-phosphate
  modified_base 11: mod_base = OTHER; note = 2'-O-methyluridine-3'-phosphate
  modified_base 12: mod_base = OTHER; note = 2'-O-methyluridine-3'-phosphate
  modified_base 13: mod_base = OTHER; note = 2'-O-methyluridine-3'-phosphate
  modified_base 15: mod_base = OTHER; note = 2'-O-methylcytidine-3'-phosphate
  modified_base 16: mod_base = OTHER; note = 2'-O-methyluridine-3'-phosphate
  misc_feature 1..19: note = RNA
  misc_feature 20..21: note = DNA
gtattccatttttactaaatt

SEQ ID NO: 1371 - DNA, 21 bp, Homo sapiens
  source 1..21: mol_type = unassigned DNA
  modified_base 3: mod_base = OTHER; note = 2'-O-methyluridine-3'-phosphate
  modified_base 6: mod_base = OTHER; note = 2'-O-methyluridine-3'-phosphate
  modified_base 17: mod_base = OTHER; note = 2'-O-methyluridine-3'-phosphate
  misc_feature 1..19: note = RNA
  misc_feature 20..21: note = DNA
tttagtaaaaatggaatactt

SEQ ID NO: 1372 - DNA, 21 bp, Homo sapiens
  source 1..21: mol_type = unassigned DNA
  modified_base 1: mod_base = OTHER; note = 2'-O-methyluridine-3'-phosphate
  modified_base 3: mod_base = OTHER; note = 2'-O-methyluridine-3'-phosphate
  modified_base 4: mod_base = OTHER; note = 2'-O-methyluridine-3'-phosphate
  modified_base 5: mod_base = OTHER; note = 2'-O-methylcytidine-3'-phosphate
  modified_base 6: mod_base = OTHER; note = 2'-O-methylcytidine-3'-phosphate
  modified_base 8: mod_base = OTHER; note = 2'-O-methyluridine-3'-phosphate
  modified_base 9: mod_base = OTHER; note = 2'-O-methyluridine-3'-phosphate
  modified_base 10: mod_base = OTHER; note = 2'-O-methyluridine-3'-phosphate
  modified_base 11: mod_base = OTHER; note = 2'-O-methyluridine-3'-phosphate
  modified_base 12: mod_base = OTHER; note = 2'-O-methyluridine-3'-phosphate
  modified_base 14: mod_base = OTHER; note = 2'-O-methylcytidine-3'-phosphate
  modified_base 15: mod_base = OTHER; note = 2'-O-methyluridine-3'-phosphate
  misc_feature 1..19: note = RNA
  misc_feature 20..21: note = DNA
tattccatttttactaaagtt

SEQ ID NO: 1373 - DNA, 21 bp, Homo sapiens
  source 1..21: mol_type = unassigned DNA
  modified_base 4: mod_base = OTHER; note = 2'-O-methyluridine-3'-phosphate
  modified_base 7: mod_base = OTHER; note = 2'-O-methyluridine-3'-phosphate
  modified_base 18: mod_base = OTHER; note = 2'-O-methyluridine-3'-phosphate
  misc_feature 1..19: note = RNA
  misc_feature 20..21: note = DNA
ctttagtaaaaatggaatatt

SEQ ID NO: 1374 - DNA, 21 bp, Homo sapiens
  source 1..21: mol_type = unassigned DNA
  modified_base 2: mod_base = OTHER; note = 2'-O-methyluridine-3'-phosphate
  modified_base 3: mod_base = OTHER; note = 2'-O-methyluridine-3'-phosphate
  modified_base 4: mod_base = OTHER; note = 2'-O-methylcytidine-3'-phosphate
  modified_base 5: mod_base = OTHER; note = 2'-O-methylcytidine-3'-phosphate
  modified_base 7: mod_base = OTHER; note = 2'-O-methyluridine-3'-phosphate
  modified_base 8: mod_base = OTHER; note = 2'-O-methyluridine-3'-phosphate
  modified_base 9: mod_base = OTHER; note = 2'-O-methyluridine-3'-phosphate
  modified_base 10: mod_base = OTHER; note = 2'-O-methyluridine-3'-phosphate
  modified_base 11: mod_base = OTHER; note = 2'-O-methyluridine-3'-phosphate
  modified_base 13: mod_base = OTHER; note = 2'-O-methylcytidine-3'-phosphate
  modified_base 14: mod_base = OTHER; note = 2'-O-methyluridine-3'-phosphate
  modified_base 19: mod_base = OTHER; note = 2'-O-methylcytidine-3'-phosphate
  misc_feature 1..19: note = RNA
  misc_feature 20..21: note = DNA
attccatttttactaaagctt

SEQ ID NO: 1375 - DNA, 21 bp, Homo sapiens
  source 1..21: mol_type = unassigned DNA
  modified_base 5: mod_base = OTHER; note = 2'-O-methyluridine-3'-phosphate
  modified_base 8: mod_base = OTHER; note = 2'-O-methyluridine-3'-phosphate
  misc_feature 1..19: note = RNA
  misc_feature 20..21: note = DNA
gctttagtaaaaatggaattt

SEQ ID NO: 1376 - DNA, 21 bp, Homo sapiens
  source 1..21: mol_type = unassigned DNA
  modified_base 1: mod_base = OTHER; note = 2'-O-methyluridine-3'-phosphate
  modified_base 2: mod_base = OTHER; note = 2'-O-methyluridine-3'-phosphate
  modified_base 3: mod_base = OTHER; note = 2'-O-methylcytidine-3'-phosphate
  modified_base 4: mod_base = OTHER; note = 2'-O-methylcytidine-3'-phosphate
  modified_base 6: mod_base = OTHER; note = 2'-O-methyluridine-3'-phosphate
  modified_base 7: mod_base = OTHER; note = 2'-O-methyluridine-3'-phosphate
  modified_base 8: mod_base = OTHER; note = 2'-O-methyluridine-3'-phosphate
  modified_base 9: mod_base = OTHER; note = 2'-O-methyluridine-3'-phosphate
  modified_base 10: mod_base = OTHER; note = 2'-O-methyluridine-3'-phosphate
  modified_base 12: mod_base = OTHER; note = 2'-O-methylcytidine-3'-phosphate
  modified_base 13: mod_base = OTHER; note = 2'-O-methyluridine-3'-phosphate
  modified_base 18: mod_base = OTHER; note = 2'-O-methylcytidine-3'-phosphate
  misc_feature 1..19: note = RNA
  misc_feature 20..21: note = DNA
ttccatttttactaaagcatt

SEQ ID NO: 1377 - DNA, 21 bp, Homo sapiens
  source 1..21: mol_type = unassigned DNA
  modified_base 6: mod_base = OTHER; note = 2'-O-methyluridine-3'-phosphate
  modified_base 9: mod_base = OTHER; note = 2'-O-methyluridine-3'-phosphate
  misc_feature 1..19: note = RNA
  misc_feature 20..21: note = DNA
tgctttagtaaaaatggaatt

SEQ ID NO: 1378 - DNA, 21 bp, Homo sapiens
  source 1..21: mol_type = unassigned DNA
  modified_base 1: mod_base = OTHER; note = 2'-O-methyluridine-3'-phosphate
  modified_base 2: mod_base = OTHER; note = 2'-O-methylcytidine-3'-phosphate
  modified_base 3: mod_base = OTHER; note = 2'-O-methylcytidine-3'-phosphate
  modified_base 5: mod_base = OTHER; note = 2'-O-methyluridine-3'-phosphate
  modified_base 6: mod_base = OTHER; note = 2'-O-methyluridine-3'-phosphate
  modified_base 7: mod_base = OTHER; note = 2'-O-methyluridine-3'-phosphate
  modified_base 8: mod_base = OTHER; note = 2'-O-methyluridine-3'-phosphate
  modified_base 9: mod_base = OTHER; note = 2'-O-methyluridine-3'-phosphate
  modified_base 11: mod_base = OTHER; note = 2'-O-methylcytidine-3'-phosphate
  modified_base 12: mod_base = OTHER; note = 2'-O-methyluridine-3'-phosphate
  modified_base 17: mod_base = OTHER; note = 2'-O-methylcytidine-3'-phosphate
  misc_feature 1..19: note = RNA
  misc_feature 20..21: note = DNA
tccatttttactaaagcagtt

SEQ ID NO: 1379 - DNA, 21 bp, Homo sapiens
  source 1..21: mol_type = unassigned DNA
  modified_base 7: mod_base = OTHER; note = 2'-O-methyluridine-3'-phosphate
  modified_base 10: mod_base = OTHER; note = 2'-O-methyluridine-3'-phosphate
  misc_feature 1..19: note = RNA
  misc_feature 20..21: note = DNA
ctgctttagtaaaaatggatt

SEQ ID NO: 1380 - DNA, 21 bp, Homo sapiens
  source 1..21: mol_type = unassigned DNA
  modified_base 1: mod_base = OTHER; note = 2'-O-methylcytidine-3'-phosphate
  modified_base 2: mod_base = OTHER; note = 2'-O-methylcytidine-3'-phosphate
  modified_base 4: mod_base = OTHER; note = 2'-O-methyluridine-3'-phosphate
  modified_base 5: mod_base = OTHER; note = 2'-O-methyluridine-3'-phosphate
  modified_base 6: mod_base = OTHER; note = 2'-O-methyluridine-3'-phosphate
  modified_base 7: mod_base = OTHER; note = 2'-O-methyluridine-3'-phosphate
  modified_base 8: mod_base = OTHER; note = 2'-O-methyluridine-3'-phosphate
  modified_base 10: mod_base = OTHER; note = 2'-O-methylcytidine-3'-phosphate
  modified_base 11: mod_base = OTHER; note = 2'-O-methyluridine-3'-phosphate
  modified_base 16: mod_base = OTHER; note = 2'-O-methylcytidine-3'-phosphate
  modified_base 19: mod_base = OTHER; note = 2'-O-methyluridine-3'-phosphate
  misc_feature 1..19: note = RNA
  misc_feature 20..21: note = DNA
ccatttttactaaagcagttt

SEQ ID NO: 1381 - DNA, 21 bp, Homo sapiens
  source 1..21: mol_type = unassigned DNA
  modified_base 8: mod_base = OTHER; note = 2'-O-methyluridine-3'-phosphate
  modified_base 11: mod_base = OTHER; note = 2'-O-methyluridine-3'-phosphate
  misc_feature 1..19: note = RNA
  misc_feature 20..21: note = DNA
actgctttagtaaaaatggtt

SEQ ID NO: 1382 - DNA, 21 bp, Homo sapiens
  source 1..21: mol_type = unassigned DNA
  modified_base 1: mod_base = OTHER; note = 2'-O-methylcytidine-3'-phosphate
  modified_base 3: mod_base = OTHER; note = 2'-O-methyluridine-3'-phosphate
  modified_base 4: mod_base = OTHER; note = 2'-O-methyluridine-3'-phosphate
  modified_base 5: mod_base = OTHER; note = 2'-O-methyluridine-3'-phosphate
  modified_base 6: mod_base = OTHER; note = 2'-O-methyluridine-3'-phosphate
  modified_base 7: mod_base = OTHER; note = 2'-O-methyluridine-3'-phosphate
  modified_base 9: mod_base = OTHER; note = 2'-O-methylcytidine-3'-phosphate
  modified_base 10: mod_base = OTHER; note = 2'-O-methyluridine-3'-phosphate
  modified_base 15: mod_base = OTHER; note = 2'-O-methylcytidine-3'-phosphate
  modified_base 18: mod_base = OTHER; note = 2'-O-methyluridine-3'-phosphate
  misc_feature 1..19: note = RNA
  misc_feature 20..21: note = DNA
catttttactaaagcagtgtt

SEQ ID NO: 1383 - DNA, 21 bp, Homo sapiens
  source 1..21: mol_type = unassigned DNA
  modified_base 1: mod_base = OTHER; note = 2'-O-methylcytidine-3'-phosphate
  modified_base 9: mod_base = OTHER; note = 2'-O-methyluridine-3'-phosphate
  modified_base 12: mod_base = OTHER; note = 2'-O-methyluridine-3'-phosphate
  misc_feature 1..19: note = RNA
  misc_feature 20..21: note = DNA
cactgctttagtaaaaatgtt

SEQ ID NO: 1384 - DNA, 21 bp, Homo sapiens
  source 1..21: mol_type = unassigned DNA
  modified_base 2: mod_base = OTHER; note = 2'-O-methyluridine-3'-phosphate
  modified_base 3: mod_base = OTHER; note = 2'-O-methyluridine-3'-phosphate
  modified_base 4: mod_base = OTHER; note = 2'-O-methyluridine-3'-phosphate
  modified_base 5: mod_base = OTHER; note = 2'-O-methyluridine-3'-phosphate
  modified_base 6: mod_base = OTHER; note = 2'-O-methyluridine-3'-phosphate
  modified_base 8: mod_base = OTHER; note = 2'-O-methylcytidine-3'-phosphate
  modified_base 9: mod_base = OTHER; note = 2'-O-methyluridine-3'-phosphate
  modified_base 14: mod_base = OTHER; note = 2'-O-methylcytidine-3'-phosphate
  modified_base 17: mod_base = OTHER; note = 2'-O-methyluridine-3'-phosphate
  modified_base 19: mod_base = OTHER; note = 2'-O-methyluridine-3'-phosphate
  misc_feature 1..19: note = RNA
  misc_feature 20..21: note = DNA
atttttactaaagcagtgttt

SEQ ID NO: 1385 - DNA, 21 bp, Homo sapiens
  source 1..21: mol_type = unassigned DNA
  modified_base 2: mod_base = OTHER; note = 2'-O-methylcytidine-3'-phosphate
  modified_base 10: mod_base = OTHER; note = 2'-O-methyluridine-3'-phosphate
  modified_base 13: mod_base = OTHER; note = 2'-O-methyluridine-3'-phosphate
  misc_feature 1..19: note = RNA
  misc_feature 20..21: note = DNA
acactgctttagtaaaaattt

SEQ ID NO: 1386 - DNA, 21 bp, Homo sapiens
  source 1..21: mol_type = unassigned DNA
  modified_base 1: mod_base = OTHER; note = 2'-O-methyluridine-3'-phosphate
  modified_base 2: mod_base = OTHER; note = 2'-O-methyluridine-3'-phosphate
  modified_base 3: mod_base = OTHER; note = 2'-O-methyluridine-3'-phosphate
  modified_base 4: mod_base = OTHER; note = 2'-O-methyluridine-3'-phosphate
  modified_base 5: mod_base = OTHER; note = 2'-O-methyluridine-3'-phosphate
  modified_base 7: mod_base = OTHER; note = 2'-O-methylcytidine-3'-phosphate
  modified_base 8: mod_base = OTHER; note = 2'-O-methyluridine-3'-phosphate
  modified_base 13: mod_base = OTHER; note = 2'-O-methylcytidine-3'-phosphate
  modified_base 16: mod_base = OTHER; note = 2'-O-methyluridine-3'-phosphate
  modified_base 18: mod_base = OTHER; note = 2'-O-methyluridine-3'-phosphate
  modified_base 19: mod_base = OTHER; note = 2'-O-methyluridine-3'-phosphate
  misc_feature 1..19: note = RNA
  misc_feature 20..21: note = DNA
tttttactaaagcagtgtttt

SEQ ID NO: 1387 - DNA, 21 bp, Homo sapiens
  source 1..21: mol_type = unassigned DNA
  modified_base 3: mod_base = OTHER; note = 2'-O-methylcytidine-3'-phosphate
  modified_base 11: mod_base = OTHER; note = 2'-O-methyluridine-3'-phosphate
  modified_base 14: mod_base = OTHER; note = 2'-O-methyluridine-3'-phosphate
  misc_feature 1..19: note = RNA
  misc_feature 20..21: note = DNA
aacactgctttagtaaaaatt

SEQ ID NO: 1388 - DNA, 21 bp, Homo sapiens
  source 1..21: mol_type = unassigned DNA
  modified_base 1: mod_base = OTHER; note = 2'-O-methyluridine-3'-phosphate
  modified_base 2: mod_base = OTHER; note = 2'-O-methyluridine-3'-phosphate
  modified_base 3: mod_base = OTHER; note = 2'-O-methyluridine-3'-phosphate
  modified_base 4: mod_base = OTHER; note = 2'-O-methyluridine-3'-phosphate
  modified_base 6: mod_base = OTHER; note = 2'-O-methylcytidine-3'-phosphate
  modified_base 7: mod_base = OTHER; note = 2'-O-methyluridine-3'-phosphate
  modified_base 12: mod_base = OTHER; note = 2'-O-methylcytidine-3'-phosphate
  modified_base 15: mod_base = OTHER; note = 2'-O-methyluridine-3'-phosphate
  modified_base 17: mod_base = OTHER; note = 2'-O-methyluridine-3'-phosphate
  modified_base 18: mod_base = OTHER; note = 2'-O-methyluridine-3'-phosphate
  modified_base 19: mod_base = OTHER; note = 2'-O-methyluridine-3'-phosphate
  misc_feature 1..19: note = RNA
  misc_feature 20..21: note = DNA
ttttactaaagcagtgttttt

SEQ ID NO: 1389 - DNA, 21 bp, Homo sapiens
  source 1..21: mol_type = unassigned DNA
  modified_base 4: mod_base = OTHER; note = 2'-O-methylcytidine-3'-phosphate
  modified_base 12: mod_base = OTHER; note = 2'-O-methyluridine-3'-phosphate
  modified_base 15: mod_base = OTHER; note = 2'-O-methyluridine-3'-phosphate
  misc_feature 1..19: note = RNA
  misc_feature 20..21: note = DNA
aaacactgctttagtaaaatt

SEQ ID NO: 1390 - DNA, 21 bp, Homo sapiens
  source 1..21: mol_type = unassigned DNA
  modified_base 1: mod_base = OTHER; note = 2'-O-methyluridine-3'-phosphate
  modified_base 2: mod_base = OTHER; note = 2'-O-methyluridine-3'-phosphate
  modified_base 3: mod_base = OTHER; note = 2'-O-methyluridine-3'-phosphate
  modified_base 5: mod_base = OTHER; note = 2'-O-methylcytidine-3'-phosphate
  modified_base 6: mod_base = OTHER; note = 2'-O-methyluridine-3'-phosphate
  modified_base 11: mod_base = OTHER; note = 2'-O-methylcytidine-3'-phosphate
  modified_base 14: mod_base = OTHER; note = 2'-O-methyluridine-3'-phosphate
  modified_base 16: mod_base = OTHER; note = 2'-O-methyluridine-3'-phosphate
  modified_base 17: mod_base = OTHER; note = 2'-O-methyluridine-3'-phosphate
  modified_base 18: mod_base = OTHER; note = 2'-O-methyluridine-3'-phosphate
  modified_base 19: mod_base = OTHER; note = 2'-O-methyluridine-3'-phosphate
  misc_feature 1..19: note = RNA
  misc_feature 20..21: note = DNA
tttactaaagcagtgtttttt

SEQ ID NO: 1391 - DNA, 21 bp, Homo sapiens
  source 1..21: mol_type = unassigned DNA
  modified_base 5: mod_base = OTHER; note = 2'-O-methylcytidine-3'-phosphate
  modified_base 13: mod_base = OTHER; note = 2'-O-methyluridine-3'-phosphate
  modified_base 16: mod_base = OTHER; note = 2'-O-methyluridine-3'-phosphate
  misc_feature 1..19: note = RNA
  misc_feature 20..21: note = DNA
aaaacactgctttagtaaatt

SEQ ID NO: 1392 - DNA, 21 bp, Homo sapiens
  source 1..21: mol_type = unassigned DNA
  modified_base 1: mod_base = OTHER; note = 2'-O-methyluridine-3'-phosphate
  modified_base 2: mod_base = OTHER; note = 2'-O-methyluridine-3'-phosphate
  modified_base 4: mod_base = OTHER; note = 2'-O-methylcytidine-3'-phosphate
  modified_base 5: mod_base = OTHER; note = 2'-O-methyluridine-3'-phosphate
  modified_base 10: mod_base = OTHER; note = 2'-O-methylcytidine-3'-phosphate
  modified_base 13: mod_base = OTHER; note = 2'-O-methyluridine-3'-phosphate
  modified_base 15: mod_base = OTHER; note = 2'-O-methyluridine-3'-phosphate
  modified_base 16: mod_base = OTHER; note = 2'-O-methyluridine-3'-phosphate
  modified_base 17: mod_base = OTHER; note = 2'-O-methyluridine-3'-phosphate
  modified_base 18: mod_base = OTHER; note = 2'-O-methyluridine-3'-phosphate
  modified_base 19: mod_base = OTHER; note = 2'-O-methylcytidine-3'-phosphate
  misc_feature 1..19: note = RNA
  misc_feature 20..21: note = DNA
ttactaaagcagtgttttctt

SEQ ID NO: 1393 - DNA, 21 bp, Homo sapiens
  source 1..21: mol_type = unassigned DNA
  modified_base 6: mod_base = OTHER; note = 2'-O-methylcytidine-3'-phosphate
  modified_base 14: mod_base = OTHER; note = 2'-O-methyluridine-3'-phosphate
  modified_base 17: mod_base = OTHER; note = 2'-O-methyluridine-3'-phosphate
  misc_feature 1..19: note = RNA
  misc_feature 20..21: note = DNA
gaaaacactgctttagtaatt

SEQ ID NO: 1394 - DNA, 21 bp, Homo sapiens
  source 1..21: mol_type = unassigned DNA
  modified_base 1: mod_base = OTHER; note = 2'-O-methyluridine-3'-phosphate
  modified_base 3: mod_base = OTHER; note = 2'-O-methylcytidine-3'-phosphate
  modified_base 4: mod_base = OTHER; note = 2'-O-methyluridine-3'-phosphate
  modified_base 9: mod_base = OTHER; note = 2'-O-methylcytidine-3'-phosphate
  modified_base 12: mod_base = OTHER; note = 2'-O-methyluridine-3'-phosphate
  modified_base 14: mod_base = OTHER; note = 2'-O-methyluridine-3'-phosphate
  modified_base 15: mod_base = OTHER; note = 2'-O-methyluridine-3'-phosphate
  modified_base 16: mod_base = OTHER; note = 2'-O-methyluridine-3'-phosphate
  modified_base 17: mod_base = OTHER; note = 2'-O-methyluridine-3'-phosphate
  modified_base 18: mod_base = OTHER; note = 2'-O-methylcytidine-3'-phosphate
  misc_feature 1..19: note = RNA
  misc_feature 20..21: note = DNA
tactaaagcagtgttttcatt

SEQ ID NO: 1395 - DNA, 21 bp, Homo sapiens
  source 1..21: mol_type = unassigned DNA
  modified_base 7: mod_base = OTHER; note = 2'-O-methylcytidine-3'-phosphate
  modified_base 15: mod_base = OTHER; note = 2'-O-methyluridine-3'-phosphate
  modified_base 18: mod_base = OTHER; note = 2'-O-methyluridine-3'-phosphate
  misc_feature 1..19: note = RNA
  misc_feature 20..21: note = DNA
tgaaaacactgctttagtatt

SEQ ID NO: 1396 - DNA, 21 bp, Homo sapiens
  source 1..21: mol_type = unassigned DNA
  modified_base 2: mod_base = OTHER; note = 2'-O-methylcytidine-3'-phosphate
  modified_base 3: mod_base = OTHER; note = 2'-O-methyluridine-3'-phosphate
  modified_base 8: mod_base = OTHER; note = 2'-O-methylcytidine-3'-phosphate
  modified_base 11: mod_base = OTHER; note = 2'-O-methyluridine-3'-phosphate
  modified_base 13: mod_base = OTHER; note = 2'-O-methyluridine-3'-phosphate
  modified_base 14: mod_base = OTHER; note = 2'-O-methyluridine-3'-phosphate
  modified_base 15: mod_base = OTHER; note = 2'-O-methyluridine-3'-phosphate
  modified_base 16: mod_base = OTHER; note = 2'-O-methyluridine-3'-phosphate
  modified_base 17: mod_base = OTHER; note = 2'-O-methylcytidine-3'-phosphate
  modified_base 19: mod_base = OTHER; note = 2'-O-methylcytidine-3'-phosphate
  misc_feature 1..19: note = RNA
  misc_feature 20..21: note = DNA
actaaagcagtgttttcactt

SEQ ID NO: 1397 - DNA, 21 bp, Homo sapiens
  source 1..21: mol_type = unassigned DNA
  modified_base 8: mod_base = OTHER; note = 2'-O-methylcytidine-3'-phosphate
  modified_base 16: mod_base = OTHER; note = 2'-O-methyluridine-3'-phosphate
  misc_feature 1..19: note = RNA
  misc_feature 20..21: note = DNA
gtgaaaacactgctttagttt

SEQ ID NO: 1398 - DNA, 21 bp, Homo sapiens
  source 1..21: mol_type = unassigned DNA
  modified_base 1: mod_base = OTHER; note = 2'-O-methylcytidine-3'-phosphate
  modified_base 2: mod_base = OTHER; note = 2'-O-methyluridine-3'-phosphate
  modified_base 7: mod_base = OTHER; note = 2'-O-methylcytidine-3'-phosphate
  modified_base 10: mod_base = OTHER; note = 2'-O-methyluridine-3'-phosphate
  modified_base 12: mod_base = OTHER; note = 2'-O-methyluridine-3'-phosphate
  modified_base 13: mod_base = OTHER; note = 2'-O-methyluridine-3'-phosphate
  modified_base 14: mod_base = OTHER; note = 2'-O-methyluridine-3'-phosphate
  modified_base 15: mod_base = OTHER; note = 2'-O-methyluridine-3'-phosphate
  modified_base 16: mod_base = OTHER; note = 2'-O-methylcytidine-3'-phosphate
  modified_base 18: mod_base = OTHER; note = 2'-O-methylcytidine-3'-phosphate
  modified_base 19: mod_base = OTHER; note = 2'-O-methylcytidine-3'-phosphate
  misc_feature 1..19: note = RNA
  misc_feature 20..21: note = DNA
ctaaagcagtgttttcacctt

SEQ ID NO: 1399 - DNA, 21 bp, Homo sapiens
  source 1..21: mol_type = unassigned DNA
  modified_base 9: mod_base = OTHER; note = 2'-O-methylcytidine-3'-phosphate
  modified_base 17: mod_base = OTHER; note = 2'-O-methyluridine-3'-phosphate
  misc_feature 1..19: note = RNA
  misc_feature 20..21: note = DNA
ggtgaaaacactgctttagtt

SEQ ID NO: 1400 - DNA, 21 bp, Homo sapiens
  source 1..21: mol_type = unassigned DNA
  modified_base 1: mod_base = OTHER; note = 2'-O-methyluridine-3'-phosphate
  modified_base 6: mod_base = OTHER; note = 2'-O-methylcytidine-3'-phosphate
  modified_base 9: mod_base = OTHER; note = 2'-O-methyluridine-3'-phosphate
  modified_base 11: mod_base = OTHER; note = 2'-O-methyluridine-3'-phosphate
  modified_base 12: mod_base = OTHER; note = 2'-O-methyluridine-3'-phosphate
  modified_base 13: mod_base = OTHER; note = 2'-O-methyluridine-3'-phosphate
  modified_base 14: mod_base = OTHER; note = 2'-O-methyluridine-3'-phosphate
  modified_base 15: mod_base = OTHER; note = 2'-O-methylcytidine-3'-phosphate
  modified_base 17: mod_base = OTHER; note = 2'-O-methylcytidine-3'-phosphate
  modified_base 18: mod_base = OTHER; note = 2'-O-methylcytidine-3'-phosphate
  modified_base 19: mod_base = OTHER; note = 2'-O-methyluridine-3'-phosphate
  misc_feature 1..19: note = RNA
  misc_feature 20..21: note = DNA
taaagcagtgttttcaccttt

SEQ ID NO: 1401 - DNA, 21 bp, Homo sapiens
  source 1..21: mol_type = unassigned DNA
  modified_base 10: mod_base = OTHER; note = 2'-O-methylcytidine-3'-phosphate
  modified_base 18: mod_base = OTHER; note = 2'-O-methyluridine-3'-phosphate
  misc_feature 1..19: note = RNA
  misc_feature 20..21: note = DNA
aggtgaaaacactgctttatt

SEQ ID NO: 1402 - DNA, 21 bp, Homo sapiens
  source 1..21: mol_type = unassigned DNA
  modified_base 5: mod_base = OTHER; note = 2'-O-methylcytidine-3'-phosphate
  modified_base 8: mod_base = OTHER; note = 2'-O-methyluridine-3'-phosphate
  modified_base 10: mod_base = OTHER; note = 2'-O-methyluridine-3'-phosphate
  modified_base 11: mod_base = OTHER; note = 2'-O-methyluridine-3'-phosphate
  modified_base 12: mod_base = OTHER; note = 2'-O-methyluridine-3'-phosphate
  modified_base 13: mod_base = OTHER; note = 2'-O-methyluridine-3'-phosphate
  modified_base 14: mod_base = OTHER; note = 2'-O-methylcytidine-3'-phosphate
  modified_base 16: mod_base = OTHER; note = 2'-O-methylcytidine-3'-phosphate
  modified_base 17: mod_base = OTHER; note = 2'-O-methylcytidine-3'-phosphate
  modified_base 18: mod_base = OTHER; note = 2'-O-methyluridine-3'-phosphate
  modified_base 19: mod_base = OTHER; note = 2'-O-methylcytidine-3'-phosphate
  misc_feature 1..19: note = RNA
  misc_feature 20..21: note = DNA
aaagcagtgttttcacctctt

SEQ ID NO: 1403 - DNA, 21 bp, Homo sapiens
  source 1..21: mol_type = unassigned DNA
  modified_base 11: mod_base = OTHER; note = 2'-O-methylcytidine-3'-phosphate
  misc_feature 1..19: note = RNA
  misc_feature 20..21: note = DNA
gaggtgaaaacactgcttttt

SEQ ID NO: 1404 - DNA, 21 bp, Homo sapiens
  source 1..21: mol_type = unassigned DNA
  modified_base 4: mod_base = OTHER; note = 2'-O-methylcytidine-3'-phosphate
  modified_base 7: mod_base = OTHER; note = 2'-O-methyluridine-3'-phosphate
  modified_base 9: mod_base = OTHER; note = 2'-O-methyluridine-3'-phosphate
  modified_base 10: mod_base = OTHER; note = 2'-O-methyluridine-3'-phosphate
  modified_base 11: mod_base = OTHER; note = 2'-O-methyluridine-3'-phosphate
  modified_base 12: mod_base = OTHER; note = 2'-O-methyluridine-3'-phosphate
  modified_base 13: mod_base = OTHER; note = 2'-O-methylcytidine-3'-phosphate
  modified_base 15: mod_base = OTHER; note = 2'-O-methylcytidine-3'-phosphate
  modified_base 16: mod_base = OTHER; note = 2'-O-methylcytidine-3'-phosphate
  modified_base 17: mod_base = OTHER; note = 2'-O-methyluridine-3'-phosphate
  modified_base 18: mod_base = OTHER; note = 2'-O-methylcytidine-3'-phosphate
  misc_feature 1..19: note = RNA
  misc_feature 20..21: note = DNA
aagcagtgttttcacctcatt

SEQ ID NO: 1405 - DNA, 21 bp, Homo sapiens
  source 1..21: mol_type = unassigned DNA
  modified_base 12: mod_base = OTHER; note = 2'-O-methylcytidine-3'-phosphate
  misc_feature 1..19: note = RNA
  misc_feature 20..21: note = DNA
tgaggtgaaaacactgctttt

SEQ ID NO: 1406 - DNA, 21 bp, Homo sapiens
  source 1..21: mol_type = unassigned DNA
  modified_base 3: mod_base = OTHER; note = 2'-O-methylcytidine-3'-phosphate
  modified_base 6: mod_base = OTHER; note = 2'-O-methyluridine-3'-phosphate
  modified_base 8: mod_base = OTHER; note = 2'-O-methyluridine-3'-phosphate
  modified_base 9: mod_base = OTHER; note = 2'-O-methyluridine-3'-phosphate
  modified_base 10: mod_base = OTHER; note = 2'-O-methyluridine-3'-phosphate
  modified_base 11: mod_base = OTHER; note = 2'-O-methyluridine-3'-phosphate
  modified_base 12: mod_base = OTHER; note = 2'-O-methylcytidine-3'-phosphate
  modified_base 14: mod_base = OTHER; note = 2'-O-methylcytidine-3'-phosphate
  modified_base 15: mod_base = OTHER; note = 2'-O-methylcytidine-3'-phosphate
  modified_base 16: mod_base = OTHER; note = 2'-O-methyluridine-3'-phosphate
  modified_base 17: mod_base = OTHER; note = 2'-O-methylcytidine-3'-phosphate
  modified_base 19: mod_base = OTHER; note = 2'-O-methyluridine-3'-phosphate
  misc_feature 1..19: note = RNA
  misc_feature 20..21: note = DNA
agcagtgttttcacctcattt

SEQ ID NO: 1407 - DNA, 21 bp, Homo sapiens
  source 1..21: mol_type = unassigned DNA
  modified_base 13: mod_base = OTHER; note = 2'-O-methylcytidine-3'-phosphate
  misc_feature 1..19: note = RNA
  misc_feature 20..21: note = DNA
atgaggtgaaaacactgcttt

SEQ ID NO: 1408 - DNA, 21 bp, Homo sapiens
  source 1..21: mol_type = unassigned DNA
  modified_base 2: mod_base = OTHER; note = 2'-O-methyluridine-3'-phosphate
  modified_base 5: mod_base = OTHER; note = 2'-O-methylcytidine-3'-phosphate
  modified_base 6: mod_base = OTHER; note = 2'-O-methylcytidine-3'-phosphate
  modified_base 12: mod_base = OTHER; note = 2'-O-methyluridine-3'-phosphate
  modified_base 14: mod_base = OTHER; note = 2'-O-methyluridine-3'-phosphate
  modified_base 15: mod_base = OTHER; note = 2'-O-methyluridine-3'-phosphate
  modified_base 16: mod_base = OTHER; note = 2'-O-methylcytidine-3'-phosphate
  modified_base 17: mod_base = OTHER; note = 2'-O-methylcytidine-3'-phosphate
  modified_base 19: mod_base = OTHER; note = 2'-O-methyluridine-3'-phosphate
  misc_feature 1..19: note = RNA
  misc_feature 20..21: note = DNA
gtaaccaagagtattccattt

SEQ ID NO: 1409 - DNA, 21 bp, Homo sapiens
  source 1..21: mol_type = unassigned DNA
  modified_base 7: mod_base = OTHER; note = 2'-O-methyluridine-3'-phosphate
  modified_base 17: mod_base = OTHER; note = 2'-O-methyluridine-3'-phosphate
  misc_feature 1..19: note = RNA
  misc_feature 20..21: note = DNA
atggaatactcttggttactt

SEQ ID NO: 1410 - DNA, 19 bp, synthetic construct
  source 1..19: mol_type = other DNA; note = Description of Artificial Sequence: Synthetic oligonucleotide
gtaaccaagagtattccat
